(19) United States
(12) Patent Application Publication
(10) Pub. No.: US 2023/0174612 A1
(43) Pub. Date: Jun. 8, 2023

(54) NOTCH RECEPTORS WITH ZINC FINGER-CONTAINING TRANSCRIPTIONAL EFFECTOR

(71) Applicants: The Regents of the University of California, Oakland, CA (US); Trustees of Boston University, Boston, MA (US)

(72) Inventors: Kole T. ROYBAL, San Francisco, CA (US); Iowis ZHU, San Francisco, CA (US); Raymond LIU, San Francisco, CA (US); Ahmad S. KHALIL, Boston, MA (US); Divya ISRANI, Boston, MA (US)

(21) Appl. No.: 17/995,765

(22) PCT Filed: Mar. 24, 2021
(86) PCT No.: PCT/US21/23911

§ 371 Date: Oct. 7, 2022

Related U.S. Application Data
(63) Continuation of application No. PCT/US2020/052244, filed on Sep. 23, 2020.
(60) Provisional application No. 63/007,795, filed on Apr. 9, 2020.
(60) Provisional application No. 63/007,795, filed on Apr. 9, 2020.

(51) Int. Cl. C07K 14/705; C07K 16/28; A61K 35/17; C12N 15/86

(52) U.S. Cl. CPC C07K 14/705; C07K 14/70517; C07K 16/2803; A61K 35/17; C12N 15/86; C07K 2319/81; C07K 2317/622; C07K 2319/03; C07K 2319/035; C07K 2317/24; C07K 2319/715; C12N 2740/15043

(57) ABSTRACT

The present disclosure generally relates to, inter alia, a new class of chimeric Notch receptors containing a synthetic zinc finger transcriptional effector (synZTE) module, engineered to modulate gene expression and cellular activities in a ligand-dependent manner. The new Notch receptors surprisingly retain the ability to transduce signals in response to ligand binding despite that the Notch extracellular subunit (NEC), which includes the negative regulatory region (NRR) previously believed to be essential for the functioning of Notch receptors, is partly or completely deleted. In addition, the synZTE is designed to bind orthogonal DNA target sequences in target organisms which in turn facilitates precise regulation of therapeutic gene expression with minimal off-target activity. Also provided are compositions and methods useful for producing such receptors, nucleic acids encoding same, host cells genetically modified with the nucleic acids, as well as methods for modulating an activity of a cell and/or for the treatment of various health conditions such as cancers.

### CROSS-REFERENCE TO RELATED APPLICATION

[0001] The present application claims priority to U.S. Provisional Patent Application Ser. No. 63/007,795, filed on Apr. 9, 2020; and International Application No. PCT/US2020/052244, filed on Sep. 23, 2020. The content of the above-referenced application is herein expressly incorporated by reference in its entirety, including any drawings.

### STATEMENT REGARDING FEDERALLY SPONSORED R&D

[0002] This invention was made with government support under grant no. OD025751 awarded by The National Institutes of Health and grant no. HR0011-623666-00 awarded by The Defense Advanced Research Projects Agency. The government has certain rights to the invention.

### INCORPORATION OF THE SEQUENCE LISTING

[0003] This application contains a Sequence Listing, which is hereby incorporated by reference in its entirety. The accompanying Sequence Listing text file, named “048536_675002WO_Sequence_Listing_ST25.txt,” was created on Mar. 14, 2021, and is 689 KB.

### FIELD

[0004] The present disclosure relates generally to new synthetic cellular receptors that bind cell-surface ligands and having selectable specificities and activities. The disclosure also provides compositions and methods useful for producing such receptors, nucleic acids encoding same, host cells genetically modified with the nucleic acids, as well as methods for modulating gene expression, modulating an activity of a cell, and/or for the treatment of various health conditions or diseases, such as cancer.

### BACKGROUND

[0005] The use of targeted cell therapy with precise regulation of therapeutic gene expression is a core strategy for the treatment of many diseases or health disorders. For example, recent advances in synthetic biology are enabling the development of new gene therapies and engineered-cell therapies. However, an important problem limiting the development of engineered cell therapies in humans is the regulation of therapeutic gene expression to reduce or eliminate interactions causing significant side effects on administration of an engineered therapeutic cell such as, off-target activity, on-target, off-tumor activity, and difficulties in modulating or turning off the therapeutic engineered cell's activity when needed. A possible solution to these problems is to modulate therapeutic gene expression and/or cellular behavior in a precise manner through the development and delivery of synthetic therapeutic systems, for example, using synthetic cellular receptors capable of binding cell-surface ligands, and capable of targeting responsive elements to conditionally induce or silence therapeutic gene expression, and/or modulate an activity of a target cell.

[0006] Examples of some first-generation synthetic therapeutic systems include synthetic derivatives of Notch receptors, which are often referred to as “SynNotch receptors” and contain structural modifications of the core force-sensing module of wild-type Notch receptors to regulate customizable intracellular trans-activators with user-defined ligand binding domains by replacing the extracellular ligand-binding domain, which in wild-type Notch contains multiple EGF-like repeats, with an antibody derivative, and replacing the cytoplasmic domain with a transcription activator of choice, while still relying on the functionality of the Notch NRR (K T Roybal et al., Cell 2016 Oct. 6; 167(2):419-32) and L. Morsut et al., Cell (2016) 164:780-91). Generally, the signaling of these first-generation SynNotch correlates with ligand binding, but it is often difficult to adjust the sensitivity and response of the receptor. Additionally, these engineered proteins are large and approach the packaging limits of traditional lentiviral delivery schemes, preventing efficient delivery and expression, and the addition of other useful molecular components. For example, the Notch regulatory regions (NRRs), previously believed to be essential for the functioning of Notch and SynNotch receptors, spans approximately 160 amino acids, making this domain alone the size of some mature proteins such as insulin or epidermal growth factor (EGF). This is believed to cause expression of the first-generation SynNotch receptors less efficient and, due to vector capacity-related size constraints, the resulting SynNotch receptors can exceed the capacity of some cloning and transfection vectors.

[0007] The disclosures provided herein address these shortcomings and provide additional benefits.

### SUMMARY

[0008] The present disclosure relates generally to a new class of chimeric Notch receptors containing a synthetic zinc finger transcriptional effector (synZTE) module, engineered to modulate gene expression and cellular activities in a ligand-dependent manner. The activity of these synZTE-containing Notch receptors can be controlled by the presence of an extracellular ligand, allowing for spatial and temporal control of specific gene expression in mammalian cells, as well as for use in modulating cell activities or in treating various health conditions or diseases. Particularly, provided herein are synZTE-containing Notch receptors that, surprisingly, retain the ability to transduce signals in response to ligand binding despite that the Notch extracellular subunit (NEC), which includes the negative regulatory region (NRR), is partly or completely removed. Additionally, these new synZTE-containing Notch receptors are functional, whereas SynNotch receptors fail to exhibit a detectable signal. In some embodiments, these new receptors incorporate a synthetic DNA-binding zinc finger protein domain (“synZF protein domain”) that is designed to bind orthogonal DNA target sequences, and have little or no binding to existing DNA sequences in organisms, which in turn allows precise regulation of therapeutic gene expression with minimal off-target activity. In some embodiments described below, the synZF-containing protein domain is operably linked to an effector domain through which the engineered Notch receptor exerts it effect. As described in greater detail below, the effector domain can be a transcriptional effector domain such as, for example, a transcription activating domain, a transcription repressor domain, or an epigenetic effector domain. Without being bound to any particular theory, it is believed that by partly or completely removing the native Notch NEC and NRR, this design of the synZTE-containing Notch receptors disclosed herein allows for nucleic acids encoding the receptors to be made smaller than existing first-generation SynNotch-encoding polynucleotides, which in turn facilitates the use of viral vectors having more limited capacity, and/or facilitates the inclusion of additional elements that would otherwise be excluded by vector capacity-related size constraints.

[0009] In one aspect, provided herein are chimeric polypeptides including, from N-terminus to C-terminus: (a) an extracellular ligand-binding domain having a binding affinity for a selected ligand; (b) a linking polypeptide having: (i) at least about 80%, 85%, 90%, 95%, 96%, 97%, 98%, 99%, or 100% sequence identity to a Notch juxtamembrane domain (JMD) wherein a LIN-12-Notch repeat (LNR) and/or a heterodimerization domain (HD) of a Notch receptor has been deleted; (ii) at least about 80%, 85%, 90%, 95%, 96%, 97%, 98%, 99%, or 100% sequence identity to a polypeptide hinge domain; or (iii) a sequence of about 2 to about 40 amino acid residues; (c) a transmembrane domain having at least about 80%, 85%, 90%, 95%, 96%, 97%, 98%, 99%, or 100% sequence identity to the transmembrane domain of a Type 1 transmembrane receptor and including one or more ligand-inducible proteolytic cleavage sites; and (d) an intracellular domain including a zinc finger-containing transcriptional effector (ZTE), wherein binding of the selected ligand to the extracellular binding domain induces cleavage at a ligand-inducible proteolytic cleavage site within the transmembrane domain.

[0010] Non-limiting exemplary embodiments of the chimeric polypeptides provided herein include one or more of the following features. In some embodiments, the chimeric polypeptide further includes a stop-transfer-sequence (STS) in between the transmembrane domain and the intracellular domain. In some embodiments, the STS is operably linked between the transmembrane domain and the intracellular domain. In some embodiments, the linking polypeptide includes an amino acid sequence having at least about 80%, 85%, 90%, 95%, 96%, 97%, 98%, 99%, or 100% sequence identity to a Notch JMD according to any one of SEQ ID NOS: 11-19. In some embodiments, the linking polypeptide has a length ranging from 1 to 40 amino acid residues. In some embodiments, the linking polypeptide includes a glycine-serine linker. In some embodiments, the linking polypeptide has the amino acid sequence (GGS)n, wherein n is an integer from 1 to about 50. In some embodiments, n is 18, 15, 12, 9, 6, or 3. In some embodiments, n is 3. In some embodiments, the linking polypeptide includes an amino acid sequence at least about 80%, 85%, 90%, 95%, 96%, 97%, 98%, 99%, or 100% sequence identity to any one of SEQ ID NOS: 25-28.

[0011] In some embodiments, the linking polypeptide of the chimeric polypeptides disclosed herein includes a hinge domain capable of promoting oligomer formation of the chimeric polypeptide via intermolecular disulfide bonding. In some embodiments, the hinge domain is derived from a CD8α hinge domain, a CD28 hinge domain, a PD-1 hinge domain, a CTLA4 hinge domain, an OX40 hinge domain, an IgG1 hinge domain, an IgG2 hinge domain, an IgG3 hinge domain, and an IgG4 hinge domain, or a functional variant of any thereof. In some embodiments, the hinge domain is derived from a CD8α hinge domain or a functional variant thereof. In some embodiments, the hinge domain is derived from a CD28 hinge domain or a functional variant thereof. In some embodiments, the hinge domain is derived from an OX40 hinge domain or a functional variant thereof. In some embodiments, the hinge domain is derived from an IgG4 hinge domain or a functional variant thereof. In some embodiments, the hinge domain includes an amino acid sequence having at least about 80%, 85%, 90%, 95%, 96%, 97%, 98%, 99%, or 100% sequence identity to any one of SEQ ID NOS: 20-24.

[0012] In some embodiments, the stop-transfer-sequence (STS) between the transmembrane domain and the intracellular domain includes an amino acid sequence having at least about 80%, 85%, 90%, 95%, 96%, 97%, 98%, 99%, or 100% sequence identity to any one of SEQ ID NOS: 39-54. In some embodiments, the transmembrane domain includes an amino acid sequence having at least 80%, 85%, 90%, 95%, 96%, 97%, 98%, 99%, or 100% sequence identity to any one of SEQ ID NOS: 29-38.

[0013] In some embodiments, the ZTE of the chimeric polypeptide disclosed herein includes: (a) a first domain including a DNA-binding zinc finger protein domain (ZF protein domain), and (b) a second domain through which the ZTE exerts its effect (effector domain), wherein the ZTE has a structure according to Formula I:

[effector domain]ₐ-[ZF protein domain]-[effector domain]_{b} (Formula I),

[0014] wherein a and b are each independently an integer from 0 to about 5, and at least one of a and b is not 0; wherein the ZF protein domain includes 1 to about 10 zinc finger arrays (ZFA); wherein the ZFA includes about 6 to about 8 zinc finger motifs having the Formula II (from N-terminal to C-terminal):

X_{c}CX_{d}CXₑ-(helix)-HX_{f}H-L² (Formula II),

[0015] wherein L² is a linker peptide having about 4-6 amino acid residues, C is Cys, H is His, each X is independently any amino acid, c is an integer from 0 to 3, d is an integer from 1 to 5, e is an integer from 2 to 7, f is an integer from 3 to 6, and (helix) is a peptide domain of about 6 amino acids that forms an α-helix, wherein the ZFA is capable of binding a specific nucleic acid sequence.

[0016] In some embodiments, the ZFA of the ZTE is capable of specifically binding to a target nucleic acid sequence selected from the group consisting of SEQ ID NOs: 61-71. In some embodiments, the ZFA includes a sequence having at least about 90% identity to a sequence selected from the group consisting of SEQ ID NOs: 55-60. In some embodiments, the ZFA has a sequence having about 100% identity to a sequence selected from the group consisting of SEQ ID NOs: 55-60.

[0017] In some embodiments, the effector domain of the ZTE includes an effector domain selected from the group consisting of a transcription activating domain, a transcription repressor domain, or an epigenetic effector domain. In some embodiments, the effector domain includes a transcription activating domain selected from the group consisting of Herpes Simplex Virus Protein 16 (HSV VP16) activation domain; an activation domain consisting of four tandem copies of VP16 (VP64); a p65 activation domain of NFκB; an Epstein-Barr virus R transactivator activation domain (Rta); a tripartite activator consisting of VP64, p65, and Rta activation domains (VPR); and a histone acetyltransferase core domain of the human E1A-associated protein p300 (p300 HAT core activation domain). In some embodiments, the effector domain includes a transcription repressor domain selected from the group consisting of a Kruppel associated box repression domain (KRAB); a Repressor Element Silencing Transcription Factor repression domain (REST); a WRPW motif of the hairy-related basic helix-loop-helix repressor proteins repression domain (WRPW); a DNA (cytosine-5)-methyltransferase 3B repression domain (DNMT3B); and an HP1 alpha chromoshadow repression domain. In some embodiments, the effector domain includes an epigenetic effector domain selected from the group consisting of a DNA methyltransferase DNMT (DNMT1, DNMT3), HAT1, GCN5, PCAF, MLL, SET, DOT1, SUV39H, G9a, KAT2A/B, EZH1/2, TET1/2, a SIRT family protein effector domain, LSD1, and a KDM family protein effector domain. In some embodiments, the effector domain includes a domain from a human protein. In some embodiments, the intracellular domain further includes a nuclear transport signal sequence.

[0018] In another aspect, provided herein are recombinant nucleic acids including a nucleotide sequence that encodes a chimeric polypeptide as disclosed herein. In some embodiments, the nucleotide sequence is incorporated into an expression cassette or an expression vector. In some embodiments, the expression vector is a viral vector. In some embodiments, the viral vector is a lentiviral vector, an adenovirus vector, an adeno-associated virus vector, or a retroviral vector.

[0019] In some embodiments, the recombinant nucleic acid further includes a response element, wherein the response element includes: (a) a ZFA target sequence; (b) an engineered responsive promoter operably linked to the ZF target sequence; and (c) a polynucleotide of interest. In some embodiments, the polynucleotide of interest encodes a regulatory RNA, a regulatory protein, a therapeutic protein, or a detectable label. In some embodiments, the detectable label is a fluorescent protein. In some embodiments, the therapeutic protein is a chimeric antigen receptor (CAR). In some embodiments, the regulatory RNA is an siRNA, shRNA, or miRNA.

[0020] In another aspect, provided herein are recombinant cells including (a) a chimeric polypeptide as disclosed herein and/or (b) a recombinant nucleic acid as disclosed herein. Also provided, in a related aspect, are cell cultures including at least one recombinant cell as disclosed herein and a culture medium. In some embodiments, the recombinant cell is a eukaryotic cell. In some embodiments, the eukaryotic cell is a mammalian cell. In some embodiments, the mammalian cell is an immune cell, a neuron, an epithelial cell, and endothelial cell, or a stem cell. In some embodiments, the immune cell is a B cell, a monocyte, a natural killer cell, a basophil, an eosinophil, a neutrophil, a dendritic cell, a macrophage, a regulatory T cell, a helper T cell, a cytotoxic T cell, or other T cell.

[0021] In some embodiments, the recombinant cell further includes an engineered response element including i) a ZFA target sequence to which a ZFA of the ZTE of the chimeric polypeptide specifically binds, ii) a promoter sequence, wherein the nucleic acid target sequence is operably linked to the 5′ end of the promoter sequence, and iii) a polynucleotide of interest operably linked to the promoter sequence, wherein binding of the ZTE to the ZFA target sequence modulates transcription initiation of a polynucleotide of interest. In some embodiments, the engineered response element is present in a nucleic acid vector, plasmid, DNA minicircle, minichromosome, or chromosome. In some embodiments, the polynucleotide of interest encodes a protein, regulatory RNA, or an antisense oligonucleotide. In some embodiments, the ZFA target sequence includes a sequence that is orthogonal to the recombinant cell genome. In some embodiments, the ZFA target sequence includes a nucleotide sequence selected from the group consisting of SEQ ID NOs: 61-71.

[0022] Another aspect relates to methods for making an engineered cells that include: (a) providing a cell capable of protein expression; and (b) transducing the cell with a recombinant nucleic acid as disclosed herein. In some embodiments, the method further includes (c) transducing the cell with a recombinant nucleic acid that encodes a response element, wherein the response element includes: (i) a ZFA target sequence; (ii) an engineered responsive promoter operably linked to the ZF target sequence; and (iii) a polynucleotide of interest.

[0023] In another aspect, provided herein are pharmaceutical compositions including a pharmaceutical acceptable carrier and one or more of the following: (a) a recombinant nucleic acid as disclosed herein, and (b) a recombinant cell as disclosed herein. In some embodiments, the disclosed pharmaceutical composition includes a recombinant nucleic acid as disclosed herein and a pharmaceutically acceptable carrier. In some embodiments, the recombinant nucleic acid is encapsulated in a viral capsid or a lipid nanoparticle.

[0024] In another aspect, provided herein are methods for modulating an activity of a target cell in an individual, including administering to the individual an effective number of the recombinant cells as disclosed herein, wherein the recombinant cells modulate an activity of the target cell in the individual.

[0025] Another aspect relates to methods for modulating an activity of a cell, including: (a) providing a recombinant cell as disclosed herein; and (b) contacting the recombinant cell with the selected ligand, wherein binding of the selected ligand to the extracellular ligand-binding domain results in cleavage of a ligand-inducible proteolytic cleavage site and release of the intracellular domain, wherein the release of the intracellular domain results in modulation of an activity of the recombinant cell. In some embodiments, the release of the intracellular domain results in binding of the ZTE of the released intracellular domain to a ZFA target sequence, which results in modulation of the expression initiation of a polynucleotide of interest, which results in modulation of an activity of the recombinant cell. In some embodiments, the activity of the cell to be modulated is selected from the group consisting of: expression of a selected gene, proliferation, apoptosis, non-apoptotic death, differentiation, dedifferentiation, migration, secretion of a molecule, cellular adhesion, and cytolytic activity. In some embodiments, the ZTE modulates expression of a gene. In some embodiments, the ZTE modulates expression of a heterologous gene product. In some embodiments, the gene product is selected from the group consisting of chemokine, a chemokine receptor, a chimeric antigen receptor, a cytokine, a cytokine receptor, a differentiation factor, a growth factor, a growth factor receptor, a hormone, a metabolic enzyme, a pathogen-derived protein, a proliferation inducer, a receptor, an RNA guided nuclease, a site-specific nuclease, a T cell receptor, a toxin, a toxin derived protein, a transcriptional regulator, a transcriptional activator, a transcriptional repressor, a translational regulator, a translational activator, a translational repressor, an activating immuno-receptor, an antibody, an apoptosis inhibitor, an apoptosis inducer, an engineered T cell receptor, an immuno-activator, an immuno-inhibitor, an immune cell receptor, and an inhibiting immuno-receptor. In some embodiments, the released ZTE modulates differentiation of the cell, and wherein the cell is an immune cell, a stem cell, a progenitor cell, or a precursor cell.

[0026] Another aspect relates to methods for treating a health condition, (e.g., disease) in an individual, including administering to the individual an effective number of the recombinant cells of the disclosure, wherein the recombinant cells treat the health condition in the individual.

[0027] In another aspect, some embodiments of the disclosure relate to kits for modulating an activity of a cell, inhibiting a target cancer cell, or treating a health condition (e.g., disease) in an individual in need thereof, wherein the systems include one or more of: a chimeric polypeptide of the disclosure; a nucleic acid of the disclosure; a recombinant cell of the disclosure; and/or a pharmaceutical composition of the disclosure. In a related aspect, some embodiments of the disclosure relate to kits for modulating an activity of a cell, wherein the kits include: (a) a chimeric polypeptide of the disclosure; (b) a nucleic acid of the disclosure; and (c) and an engineered response element including: (i) a ZFA target sequence; (ii) an engineered responsive promoter operably linked to the ZFA target sequence; and (iii) a polynucleotide of interest; wherein binding of the ZTE to the nucleic acid target sequence modulates transcription initiation of the polynucleotide of interest.

[0028] Yet another aspect of the disclosure is the use of one or more of: a chimeric polypeptide of the disclosure; a polynucleotide of the disclosure; a recombinant cell of the disclosure; and a pharmaceutical composition of the disclosure; for the treatment of a health condition, such as a disease. In some embodiments, the disease is cancer.

[0029] Another aspect of the disclosure is the use of one or more of: a chimeric polypeptide of the disclosure; a polynucleotide of the disclosure; a recombinant cell of the disclosure; or a pharmaceutical composition of the disclosure; for the manufacture of a medicament for the treatment of a health condition.

[0030] The foregoing summary is illustrative only and is not intended to be in any way limiting. In addition to the illustrative embodiments and features described herein, further aspects, embodiments, objects and features of the disclosure will become fully apparent from the drawings and the detailed description and the claims.

### BRIEF DESCRIPTION OF THE DRAWINGS

[0031] FIG. 1 schematically illustrates non-limiting examples of engineered Notch receptor variants. SynNotch variants leverage the core force-sensing module of Notch (ligand-inducible cleavage at the S3 site) to regulate customizable intracellular transactivators with user-defined ligand binding domains. In MiniNotch variants, much of the regulatory region is further truncated. HingeNotch variants additionally feature disulfide-mediated oligomerization due to the insertion of a Hinge domain (for instance, a hinge domain from CD8).

[0032] FIG. 2 schematically summarizes the results from experiments performed to assess functionality of three exemplary engineered Notch receptors variants coupled with zinc finger-based transcriptional effectors (synZTE).

[0033] FIG. 3 schematically summarizes the results of experiments performed to further illustrate incapability of two exemplary human SynNotch receptor derivatives in accordance with some embodiments of the disclosure, which contained either zinc-finger transcriptional effector ZF3 or ZF10. In these experiments, Jurkat T-cells were transduced with anti-CD19 SynNotch receptors containing either ZF3 or ZF10 transcriptional effectors with unique DNA binding specificities, along with their cognate mCitrine reporter. Reporter gene expression data indicates receptor-mediated activation with antigen-negative cells (+K562) vs. antigen-positive K562 cells (+K562 CD19) after 24 hours of co-incubation. The results demonstrate that the synNotch receptors failed to activate.

[0034] FIG. 4 summarizes the results of experiments performed to assess functionality of Hinge-Notch receptors in accordance with some embodiments of the disclosure, each having one of six exemplary zinc-finger transcriptional effectors: ZF2, ZF3, ZF4, ZF6, ZF10, and ZF11. In these experiments, primary CD4+ T-cells from two different donors were transduced with anti-CD19 HingeNoch receptors containing one of six different SynTF transactivators with unique DNA binding specificities, along with their cognate BFP-expressing reporters. Reporter expression data indicates receptor activation with antigen-negative cells (+K562) vs. antigen-positive K562 cells (+K562 CD19) after 48 hours of co-incubation (N=2; error bars represent standard deviation).

[0035] FIG. 5 schematically summarizes the normalized fluorescence activation profiles of the T-cells described in FIG. 4 co-incubated with antigen-negative (crossed) or antigen-positive (slashed) K562 target cells.

[0036] FIG. 6 schematically illustrates expression levels of six exemplary HingeNotch-zinc-finger synTF receptors described in FIGS. 4 and 5. In FIG. 6, expression levels of HingeNotch-zinc-finger synTF receptors are indicated on vertical axis and the cognate reporter is indicated on horizontal axis.

[0037] FIGS. 7A-7C schematically summarize the results of experiments performed to optimize the functionality of synZTE-containing HingeNotch receptors. FIG. 7A shows a sequence schematic of loci within a lentiviral expression construct for an exemplary synZTE-containing HingeNotch ZF6, i.e., pDP1160 (SEQ ID NO: 7), that were interspersed with functionally unannotated sequences. These include (i) an alanine between the HingeNotch core functional region and the nuclear localization sequence (NLS) of the synZTE-containing HingeNotch (Linker 1), (ii) several potentially non-essential regions between the NLS and zinc-finger domain consisting of a polypeptide (Linker 2), (iii) the expression product of an XhoI restriction enzyme site (Linker 3), (iv) a flexible linker glycine-serine (Linker 4), (v) the expression product KpnI and NheI restriction enzyme sites (Linker 5), and also (vi) the expression product of BamHI and SbfI site restriction enzyme sites between the zinc finger and transactivation domain p65 (Linker 6)). Additionally, the 108 bp between the p65 transactivation domain and the WPRE were replaced with an 8 bp NotI site (Linker 7). Moreover, in one construct, the full-length transactivation domain p65 was replaced with a minimal sequence starting at residue P68. FIG. 7B summarizes BFP expression from Jurkat cells transduced with a ZF6BD-BFP reporter construct and a panel of anti-CD19 HingeNotch-ZF6 expression vectors bearing the indicated linker deletions or modifications. In these experiments, cells were stimulated with unmodified K562 cells (left panel) or CD19-expression K562 cells (right panel). FIG. 7C depicts percentage of BFP-expressing Jurkat cells (left panel) and BFP MFI (right panel) tabulated for the data presented in FIG. 7B.

[0038] FIGS. 8A-8C pictorially summarize of the expression profiles of the original synZTE-containing HingeNotch receptor versus partially minimized synZTE-HingeNotch variants bearing ZF6 or ZF10, as described in FIGS. 7A-7C above. As shown in FIG. 8A, the minimized versions that bear none of the linker sequences deleted but that retained the full-length transactivation domain p65 express equally or better than their counterparts with all linkers intact. FIG. 8B shows BFP expression from the construct referenced in FIG. 8A after stimulation with unmodified or CD19-expressing K562 cells. FIG. 8C shows percent BFP-expressing T-cells (left) and BFP MFI (right) tabulated for the data in FIG. 8B.

[0039] FIGS. 9A-9B schematically summarize the results of experiments performed modifying nuclear localization sequence (NLS) to modulate receptor activity. FIG. 9A shows BFP expression of primary CD4+ T-cells transduced with MiniNotch receptor variants bearing synthetic zinc finger-containing transcriptional activators (SynTFs) consisting of the ZF3 zinc finger and transactivation domain p65, with either the original SV40 NLS or the hNotch1 NLS. FIG. 9B shows BFP expression MFI quantified for the experiment shown in FIG. 9A.

[0040] FIG. 10 schematically summarizes the results of experiments performed to evaluate the activation performance of synZTE-containing HingeNotch receptors relative to Gal4-VP64.

[0041] FIG. 11 schematically summarizes the results of experiments performed to illustrate the specific target cell killing via synZTE-containing HingeNotch receptors.

### DETAILED DESCRIPTION OF THE DISCLOSURE

[0042] The present disclosure generally relates to, among other things, a new class of chimeric Notch receptors that include a synthetic zinc finger-containing transcriptional effector (synZTE) module and are engineered to modulate transcriptional regulation in a ligand-dependent manner. Particularly, the new receptors (termed “synZTE-containing Notch receptors”) surprisingly retain the ability to transduce signals in response to ligand binding despite that the Notch extracellular subunit (NEC), which includes the negative regulatory region (NRR) previously believed to be essential for the functioning of Notch receptors, is partly or completely removed. As described below, the new class of chimeric Notch receptors disclosed herein does not occur in nature, and can be engineered, designed, or modified so as to provide desired and/or improved properties, e.g., in modulating transcription. The activity of these synZTE-containing Notch receptors can be controlled by the presence of an extracellular ligand, allowing for spatial and temporal control of specific gene expression in mammalian cells, as well as for use in modulating cell activities or in treating various health conditions (e.g., diseases). The demonstration that the new synZTE-containing Notch receptors as disclosed herein are not only functional but demonstrate enhanced biologic activity is surprising and is completely contrary to the teachings in the field. In some embodiments, the chimeric Notch receptors disclosed herein bind a target cell-surface ligand, which triggers proteolytic cleavage of the chimeric receptor and release of a transcriptional effector (e.g., synZTE) that modulates a custom transcriptional program in the cell.

[0043] These chimeric receptors of the disclosure incorporate a synthetic DNA-binding zinc finger protein domain (synSF protein domain) that is designed to bind orthogonal DNA target sequences and has little or no binding activity to existing DNA sequences in organisms, which in turn facilitates precise regulation of therapeutic gene expression with minimal off-target activity.

[0044] The combination of a synZTE and a chimeric Notch receptor capable of specifically binding a target cell-surface ligand forms a unique expression system that is artificial, scalable, and regulatable, for the expressions of desired genes and response elements, with no or minimal effects on the expression of endogenous genes, meaning no or minimal off-site gene regulation of endogenous genes. Further, the present disclosure demonstrates that an augmented transactivation domain fusion (e.g., p65-GR1 or p65-HSF1) enables chimeric Notch receptors (e.g., HingeNotch receptors) bearing zinc finger DNA binding domains to activate to a higher output level. In some embodiments, the augmented output level can be similar to that of the original Gal4-VP64-containing receptor.

[0045] The disclosure also provides compositions and methods useful for producing such receptors, nucleic acids encoding same, cells genetically modified with the nucleic acids, as well as methods for modulating an activity of a cell and/or for the treatment of various health conditions or diseases such as cancers.

[0046] In the following detailed description, reference is made to the accompanying drawings, which form a part hereof. In the drawings, similar symbols generally identify similar components, unless context dictates otherwise. The illustrative alternatives described in the detailed description, drawings, and claims are not meant to be limiting. Other alternatives may be used and other changes may be made without departing from the spirit or scope of the subject matter presented here. It will be readily understood that the aspects, as generally described herein, and illustrated in the Figures, can be arranged, substituted, combined, and designed in a wide variety of different configurations, all of which are explicitly contemplated and make part of this application.

### Definitions

[0047] The singular form “a”, “an”, and “the” include plural references unless the context clearly dictates otherwise. For example, the term “a cell” includes one or more cells, including mixtures thereof. “A and/or B” is used herein to include all of the following alternatives: “A”, “B”, “A or B”, and “A and B.”

[0048] The terms “administration” and “administering”, as used herein, refer to the delivery of a composition or formulation as disclosed herein by an administration route including, but not limited to, intravenous, intra-arterial, intracranial, intramuscular, intraperitoneal, subcutaneous, intramuscular, or combinations thereof. The term includes, but is not limited to, administration by a medical professional and self-administration.

[0049] “Cancer” refers to the presence of cells possessing several characteristics typical of cancer-causing cells, such as uncontrolled proliferation, immortality, metastatic potential, rapid growth and proliferation rate, and certain characteristic morphological features. Some types of cancer cells can aggregate into a mass, such as a tumor, but some cancer cells can exist alone within a subject. A tumor can be a solid tumor, a soft tissue tumor, or a metastatic lesion. As used herein, the term “cancer” also encompasses other types of non-tumor cancers. Non-limiting examples include blood cancers or hematologic malignancies, such as leukemia, lymphoma, and myeloma. Cancer can include premalignant, as well as malignant cancers.

[0050] The terms “cell”, “cell culture”, “cell line” refer not only to the particular subject cell, cell culture, or cell line but also to the progeny or potential progeny of such a cell, cell culture, or cell line, without regard to the number of transfers or passages in culture. It should be understood that not all progeny are exactly identical to the parental cell. This is because certain modifications may occur in succeeding generations due to either mutation (e.g., deliberate or inadvertent mutations) or environmental influences (e.g., methylation or other epigenetic modifications), such that progeny may not, in fact, be identical to the parent cell, but are still included within the scope of the term as used herein, so long as the progeny retain the same functionality as that of the originally cell, cell culture, or cell line.

[0051] The term “modulating,” in relation to the expression or activity of a polypeptide refers a change in the expression or activity of the polypeptide. Modulation includes both activation (e.g., increase, induce, stimulate) and repression or inhibition (e.g., decrease, reduce, inhibit), or otherwise affecting the expression or activity of the polypeptide. The term may also refer to decreasing, reducing, inhibiting, increasing, inducing, activating, or otherwise affecting the activity of a gene encoding the polypeptide which can include, but is not limited to, modulating transcriptional activity.

[0052] The term “operably linked”, as used herein, denotes a physical or functional linkage between two or more elements, e.g., polypeptide sequences or polynucleotide sequences, which permits them to operate in their intended fashion. For example, the term “operably linked” when used in context of the orthogonal DNA target sequences described herein or the promoter sequence in a nucleic acid construct, or in an engineered response element means that the orthogonal DNA target sequences and the promoters are in-frame and in proper spatial and distance away from a polynucleotide of interest coding for a protein or an RNA to permit the effects of the respective binding by transcription factors or RNA polymerase on transcription.

[0053] As used herein, the term “orthogonal DNA sequence elements” refers to those DNA sequences that are not found or are rarely represented in the eukaryotic genome in nature.

[0054] As used herein, the term “orthogonus” when use in context with nucleic acid sequences such as DNA refers to those not naturally found in nature.

[0055] The term “percent identity” as used herein in the context of two or more nucleic acids or proteins, refers to two or more sequences or subsequences that are the same or have a specified percentage of nucleotides or amino acids that are the same (e.g., about 60% sequence identity, 65%, 70%, 75%, 80%, 85%, 90%, 91%, 92%, 93%, 94%, 95%, 96%, 97%, 98%, 99%, or higher identity over a specified region, when compared and aligned for maximum correspondence over a comparison window or designated region) as measured using a BLAST or BLAST 2.0 sequence comparison algorithms with default parameters described below, or by manual alignment and visual inspection. See e.g., the NCBI web site at ncbi.nlm.nih.gov/BLAST. Such sequences are then said to be “substantially identical.” This definition also refers to, or may be applied to, the complement of a sequence. This definition also includes sequences that have deletions and/or additions, as well as those that have substitutions. Sequence identity can be calculated over a region that is at least about 20 amino acids or nucleotides in length, or over a region that is 10-100 amino acids or nucleotides in length, or over the entire length of a given sequence. Sequence identity can be calculated using published techniques and widely available computer programs, such as the GCS program package (Devereux et al, Nucleic Acids Res. 12:387, 1984), BLASTP, BLASTN, FASTA (Atschul et al., J Mol Biol 215:403, 1990). Sequence identity can be measured using sequence analysis software such as the Sequence Analysis Software Package of the Genetics Computer Group at the University of Wisconsin Biotechnology Center (1710 University Avenue, Madison, Wis. 53705), with the default parameters thereof.

[0056] As used herein, and unless otherwise specified, a “therapeutically effective amount” of an agent is an amount sufficient to provide a therapeutic benefit in the treatment or management of a disease, e.g., the cancer, or to delay or minimize one or more symptoms associated with the disease. A therapeutically effective amount of a compound means an amount of therapeutic agent, alone or in combination with other therapeutic agents, which provides a therapeutic benefit in the treatment or management of the disease. The term “therapeutically effective amount” can encompass an amount that improves overall therapy of the disease, reduces or avoids symptoms or causes of the disease, or enhances the therapeutic efficacy of another therapeutic agent. An example of an “effective amount” is an amount sufficient to contribute to the treatment, prevention, or reduction of a symptom or symptoms of a disease, which could also be referred to as a “therapeutically effective amount.” A “reduction” of a symptom means decreasing of the severity or frequency of the symptom(s), or elimination of the symptom(s). The exact amount of a composition including a “therapeutically effective amount” will depend on the purpose of the treatment, and will be ascertainable by one skilled in the art using known techniques (see, e.g., Lieberman, Pharmaceutical Dosage Forms (vols. 1-3, 2010); Lloyd, The Art, Science and Technology of Pharmaceutical Compounding (2016); Pickar, Dosage Calculations (2012); and Remington: The Science and Practice of Pharmacy, 22nd Edition, 2012, Gennaro, Ed., Lippincott, Williams & Wilkins).

[0057] As used herein, a “subject” or an “individual” includes animals, such as human (e.g., human individuals) and non-human animals. In some embodiments, a “subject” or “individual” is a patient under the care of a physician. Thus, the subject can be a human patient or an individual who has, is at risk of having, or is suspected of having a disease of interest (e.g., cancer) and/or one or more symptoms of the disease. The subject can also be an individual who is diagnosed with a risk of the condition of interest at the time of diagnosis or later. The term “non-human animals” includes all vertebrates, e.g., mammals, e.g., rodents, e.g., mice, non-human primates, and other mammals, such as e.g., sheep, dogs, cows, chickens, and non-mammals, such as amphibians, reptiles, etc.

[0058] Where a range of values is provided, it is understood that each intervening value, to the tenth of the unit of the lower limit unless the context clearly dictates otherwise, between the upper and lower limit of that range and any other stated or intervening value in that stated range, is encompassed within the disclosure. The upper and lower limits of these smaller ranges may independently be included in the smaller ranges, and are also encompassed within the disclosure, subject to any specifically excluded limit in the stated range. Where the stated range includes one or both of the limits, ranges excluding either or both of those included limits are also included in the disclosure.

[0059] All ranges disclosed herein also encompass any and all possible sub-ranges and combinations of sub-ranges thereof. Any listed range can be recognized as sufficiently describing and enabling the same range being broken down into at least equal halves, thirds, quarters, fifths, tenths, etc. As a non-limiting example, each range discussed herein can be readily broken down into a lower third, middle third and upper third, and so forth. As will also be understood by one skilled in the art all language such as “up to,” “at least,” “greater than,” “less than,” and the like include the number recited and refer to ranges which can be subsequently broken down into sub-ranges as discussed above. Finally, as will be understood by one skilled in the art, a range includes each individual member. Thus, for example, a group having 1-3 articles refers to groups having 1, 2, or 3 articles. Similarly, a group having 1-5 articles refers to groups having 1, 2, 3, 4, or 5 articles, and so forth.

[0060] It is appreciated that certain features of the disclosure, which are, for clarity, described in the context of separate embodiments, may also be provided in combination in a single embodiment. Conversely, various features of the disclosure, which are, for brevity, described in the context of a single embodiment, may also be provided separately or in any suitable sub-combination. All combinations of the embodiments pertaining to the disclosure are specifically embraced by the present disclosure and are disclosed herein just as if each and every combination was individually and explicitly disclosed. In addition, all sub-combinations of the various embodiments and elements thereof are also specifically embraced by the present disclosure and are disclosed herein just as if each and every such sub-combination was individually and explicitly disclosed herein.

### Notch Receptors

[0061] Notch receptors are transmembrane proteins that mediate cell-cell contact signaling and play a central role in development and other aspects of cell-to-cell communication. Notch receptors have a modular domain organization. The Notch extracellular subunit (NEC) of wild type Notch receptors consist of a series of N-terminal epidermal growth factor receptor (EGFR)-like repeats that are responsible for ligand binding. O-linked glycosylation of these EGFR repeats, including modification by O-fucose, Fringe, and Rumi glycosyltransferases, also modulates the activity of Notch receptors in response to different ligand subtypes in flies and mammals. The EGFR repeats are followed by three LIN-12/Notch repeat (LNR) modules, which are unique to Notch receptors, and are widely reported to participate in preventing premature receptor activation. The heterodimerization (HD) domain of Notch1 is divided by furin cleavage, so that its N-terminal part terminates the Notch extracellular subunit (NEC), and its C-terminal half constitutes the beginning of the Notch transmembrane (NTM) subunit. Following the extracellular HD-C region of the NEC is a transmembrane segment and an intracellular region (ICN), which includes a transcriptional activator.

[0062] Notch receptors mediate cell-cell contact signaling and play a central role in development and other aspects of cell-to-cell communication, e.g., communication between two contacting cells, in which one contacting cell is a “receiver” cell and the other contacting cell is a “sender” cell. Notch receptors expressed in a receiver cell recognize their ligands (e.g., the delta/serrate/lag, or “DSL” family of proteins), expressed on a sending cell. The engagement of notch and delta on these contacting cells leads to two-step proteolysis of the notch receptor that ultimately causes the release of the intracellular portion of the receptor from the membrane into the cytoplasm. Notch has a metalloprotease cleavage site (denoted “S2”), which is normally protected from cleavage by the Notch negative regulatory region (NRR), a domain consisting of three LNR modules and an HD of the NEC. It is believed that this two-step proteolysis is regulated by the force exerted by the sending cell: the DSL ligand pulls on the Notch receptor and changes the conformation of the negative regulatory region, exposing the metalloprotease site. That site is then cleaved by a constitutively active protease, releasing the extracellular binding portion and negative regulatory region (NRR) of the receptor. Release of the extracellular binding portion of the receptor in turn exposes another intramembrane cleavage site(s) (denoted “S3”), which is/are cleaved by gamma secretase within the cell membrane to release the nuclear homing intracellular domain from the cell membrane. W. R. Gordon et al., Dev Cell (2015) 33:729-36. This released domain alters receiver cell behavior by functioning as a transcriptional regulator.

[0063] Notch receptors are involved in and are required for a variety of cellular functions during development and are important for the function of a vast number of cell-types across species. Evolutionary divergence of vertebrates and invertebrates has been accompanied by at least two rounds of gene duplication involving the Notch receptors: flies possess a single Notch gene, worms two (GLP-1 and LIN-12), and mammals four (NOTCH1-4). Transduction of Notch signals relies on three key events: (i) ligand recognition, (ii) conformational exposure of the ligand-dependent cleavage site, and (iii) assembly of nuclear transcriptional activation complexes.

[0064] Canonical Notch signals are transduced by a process called regulated intramembrane proteolysis. Notch receptors are normally maintained in a resting, proteolytically resistant conformation on the cell surface, but ligand binding initiates a proteolytic cascade that releases the intracellular portion of the receptor (also known as intracellular notch (ICN) or Notch intracellular domain (NICD)) from the membrane. The critical, regulated cleavage step is effected by ADAM metalloproteases and occurs at a site called S2 immediately external to the plasma membrane. This truncated receptor, dubbed NEXT (for Notch extracellular truncation), remains membrane tethered until it is processed at site S3 by gamma secretase, a multiprotein enzyme complex.

[0065] After gamma secretase-mediated cleavage, the ICN ultimately enters the nucleus, where it assembles a transcriptional activation complex that contains a DNA-binding transcription factor termed CSL (C-promoter-binding factor in mammals; also known as RBP-J)/Suppressor of hairless in Drosophila melanogaster or Lag1 in Caenorhabditis elegans), and a transcriptional coactivator of the Mastermind/Lag-3 family. This complex then engages additional coactivator proteins such as p300 to recruit the basal transcription machinery and activate the expression of downstream target genes.

[0066] Additional information regarding Notch receptors and Notch-mediated cell signaling can be found in, for example, W. R. Gordon et al., Dev Cell (2015) 33:729-36 and W. R. Gordon et al., J. Cell Sci. (2008) 121:3109-19, both of which are hereby incorporated by reference.

### Compositions of the Disclosure

[0067] As described in greater detail below, one aspect of the present disclosure relates to a new class of chimeric Notch receptors that include a synthetic zinc finger-containing transcriptional effector (synZTE) module and are engineered to modulate transcriptional regulation in a ligand-dependent manner with various advantages over existing first-generation SynNotch receptors. For example, since natural Notch receptors are large with the NEC subunit containing several dozen tandem EGFR-like repeats, by partly or completely omitting the Notch regulatory regions, or even removing the entire NEC subunit, nucleic acids encoding the synZTE-containing Notch receptors of the disclosure can be made smaller than natural Notch receptors and existing SynNotch-encoding polynucleotides, which enables the use of vectors having more limited capacity, or the inclusion of additional elements that would otherwise be excluded by vector capacity-related size constraints.

[0068] In addition, these new receptors incorporate a synthetic DNA-binding zinc finger protein domain (synSF protein domain) that is designed to bind orthogonal DNA target sequences, and has little or no binding activity to existing DNA sequences in organisms. The combination of a synZTE and a chimeric Notch receptor capable of specifically binding a target cell-surface ligand forms a unique expression system that is artificial, scalable, and regulatable, for the expressions of desired genes and response elements, with no or minimal effects on the expression of endogenous genes, meaning no or minimal off-site gene regulation of endogenous genes.

### Chimeric Polypeptides

[0069] As described in greater detail herein, some embodiments of the present disclosure relate to novel, non-naturally occurring chimeric polypeptides engineered to modulate transcriptional regulation in a ligand-dependent manner. In particular, the new receptors, even though derived from Notch, do not require the Notch regulatory regions (NRRs) previously believed to be essential for the functioning of the receptors. Furthermore, the new engineered receptors described herein incorporate an extracellular oligomerization domain (e.g., hinge domain) to promote oligomerization to form higher order oligomeric, e.g., dimeric or trimeric, forms of the chimeric receptors. In some embodiments, the hinge domain includes polypeptide motifs capable of promoting oligomer formation of the chimeric polypeptide via intermolecular disulfide bonding. The extracellular oligomerization domain can replace part or all of the Notch extracellular domain. In some embodiments, the receptors disclosed herein bind a target cell-surface ligand, which triggers proteolytic cleavage of the receptors and release of a transcriptional regulator that modulates a custom transcriptional program in the cell.

[0070] In some embodiments, the chimeric polypeptide of the disclosure includes, from N-terminus to C-terminus: (a) an extracellular ligand-binding domain having a binding affinity for a selected ligand; (b) a linking polypeptide having a sequence of about 2 to about 40 amino acid residues; (c) a transmembrane domain having at least about 80% sequence identity to the transmembrane domain of a Type 1 transmembrane receptor and including one or more ligand-inducible proteolytic cleavage sites; and (d) an intracellular domain including a zinc finger-containing transcriptional effector (ZTE), wherein binding of the selected ligand to the extracellular binding domain induces cleavage at a ligand-inducible proteolytic cleavage site within the transmembrane domain. In some embodiments, the linking polypeptide has at least about 80% sequence identity to a Notch JMD wherein a LIN-12-Notch repeat (LNR) and/or a heterodimerization domain (HD) of a Notch receptor has been deleted. In some embodiments, the linking polypeptide has at least about 80% sequence identity to a hinge domain, e.g., an oligomerization domain containing one or more polypeptide motifs that promote oligomer formation of the chimeric polypeptides via intermolecular disulfide bonding.

[0071] Extracellular Ligand-Binding Domains (ECD)

[0072] In some embodiments, the ECD of the chimeric polypeptide receptors disclosed herein (e.g., synZTE-containing Notch receptors) has a binding affinity for one or more target ligands. The target ligand is expressed on a cell surface, or is otherwise anchored, immobilized, or restrained so that it can exert a mechanical force on the chimeric receptor. As such, without being bound to any particular theory, binding of the ECD of a chimeric receptor provided herein to a cell-surface ligand does not necessarily remove the target ligand from the target cell surface, but instead enacts a mechanical pulling force on the chimeric receptor. For example, an otherwise soluble ligand may be targeted if it is bound to a surface, or to a molecule in the extracellular matrix. In some embodiments, the target ligand is a cell-surface ligand. Non-limiting examples of suitable ligand types include cell surface receptors, adhesion proteins, carbohydrates, lipids, glycolipids, lipoproteins, and lipopolysaccharides that are surface-bound, integrins, mucins, and lectins. In some embodiments, the ligand is a protein. In some embodiments, the ligand is a carbohydrate.

[0073] In some embodiments, the ECD includes the ligand-binding portion of a receptor. In some embodiments, the ECD includes an antigen-binding moiety that binds to one or more target antigens. In some embodiments, the antigen-binding moiety includes one or more antigen-binding determinants of an antibody or a functional antigen-binding fragment thereof. One skilled in the art upon reading the present disclosure will readily understand that the term “functional fragment thereof” or “functional variant thereof” refers to a molecule having quantitative and/or qualitative biological activity in common with the wild-type molecule from which the fragment or variant was derived. For example, a functional fragment or a functional variant of an antibody is one which retains essentially the same ability to bind to the same epitope as the antibody from which the functional fragment or functional variant was derived. For instance, an antibody capable of binding to an epitope of a cell surface receptor may be truncated at the N-terminus and/or C-terminus, and the retention of its epitope binding activity assessed using assays known to those of skill in the art. In some embodiments, the antigen-binding moiety is selected from the group consisting of an antibody, a nanobody, a diabody, a triabody, or a minibody, an F(ab′)2 fragment, an F(ab) fragment, a single chain variable fragment (scFv), and a single domain antibody (sdAb), or a functional fragment thereof. In some embodiments, the antigen-binding moiety includes an scFv.

[0074] The antigen-binding moiety can include naturally-occurring amino acid sequences or can be engineered, designed, or modified to provide desired and/or improved properties such as, e.g., binding affinity. Generally, the binding affinity of an antigen-binding moiety, e.g., an antibody, for a target antigen (e.g., CD19 antigen) can be calculated by the Scatchard method described by Frankel et al., Mol. Immunol, 16:101-06, 1979. In some embodiments, binding affinity is measured by an antigen/antibody dissociation rate. In some embodiments, binding affinity is measured by a competition radioimmunoassay. In some embodiments, binding affinity is measured by ELISA. In some embodiments, antibody affinity is measured by flow cytometry. An antibody that “selectively binds” an antigen (such as CD19) is an antigen-binding moiety that does not significantly bind other antigens but binds the antigen with high affinity, e.g., with an equilibrium constant (K_{D}) of 100 nM or less, such as 60 nM or less, for example, 30 nM or less, such as, 15 nM or less, or 10 nM or less, or 5 nM or less, or 1 nM or less, or 500 pM or less, or 400 pM or less, or 300 pM or less, or 200 pM or less, or 100 pM or less.

[0075] A skilled artisan can select an ECD based on the desired localization or function of a cell that is genetically modified to express a chimeric polypeptide or synZTE-containing Notch receptor of the present disclosure. For example, a chimeric polypeptide or synZTE-containing Notch receptor with an ECD including an antibody specific for a HER2 antigen can target cells to HER2-expressing breast cancer cells. In some embodiments, the ECD of the synZTE-containing Notch receptors disclosed herein is capable of binding a tumor-associated antigen (TAA) or a tumor-specific antigen (TSA). A skilled artisan will understand that TAAs include a molecule, such as e.g., protein, present on tumor cells and on normal cells, or on many normal cells, but at much lower concentration than on tumor cells. In contrast, TSAs generally include a molecule, such as e.g., protein which is present on tumor cells but absent from normal cells.

[0076] In some embodiments of the disclosure, the antigen-binding moiety of the ECD is specific for an epitope present in an antigen that is expressed by a tumor cell, i.e., a tumor-associated antigen. The tumor-associated antigen can be an antigen associated with, e.g., a breast cancer cell, a B cell lymphoma, a pancreatic cancer, a Hodgkin lymphoma cell, an ovarian cancer cell, a prostate cancer cell, a mesothelioma, a lung cancer cell, a non-Hodgkin B-cell lymphoma (B-NHL) cell, an ovarian cancer cell, a prostate cancer cell, a mesothelioma cell, a melanoma cell, a chronic lymphocytic leukemia cell, an acute lymphocytic leukemia cell, a neuroblastoma cell, a glioma, a glioblastoma, a colorectal cancer cell, etc. It will also be understood that a tumor-associated antigen may also be expressed by a non-cancerous cell. In some embodiments, the antigen-binding domain is specific for an epitope present in a tissue-specific antigen. In some embodiments, the antigen-binding domain is specific for an epitope present in a disease-associated antigen.

[0077] Non-limiting examples of suitable target antigens include CD19, B7H3 (CD276), BCMA(CD269), alkaline phosphatase placental-like 2 (ALPPL2), green fluorescent protein (GFP), enhanced green fluorescent protein (EGFP), and signal regulatory protein α (SIRPα), CD123, CD171, CD179a, CD20, CD213A2, CD22, CD24, CD246, CD272, CD30, CD33, CD38, CD44v6, CD46, CD71, CD97, CEA, CLDN6, CLECL1, CS-1, EGFR, EGFRvIII, ELF2M, EpCAM, EphA2, Ephrin B2, FAP, FLT3, GD2, GD3, GM3, GPRC5D, HER2 (ERBB2/neu), IGLL1, IL-11Rα, KIT (CD 117), MUC1, NCAM, PAP, PDGFR-β, PRSS21, PSCA, PSMA, ROR1, SSEA-4, TAG72, TEM1/CD248, TEM7R, TSHR, VEGFR2, ALPI, citrullinated vimentin, cMet, and Axl.

[0078] In some embodiments, the target antigen is selected from CD19, B7H3 (CD276), BCMA (CD269), CD123, CD171, CD179a, CD20, CD213A2, CD22, CD24, CD246, CD272, CD30, CD33, CD38, CD44v6, CD46, CD71, CD97, CEA, CLDN6, CLECL1, CS-1, EGFR, EGFRvIII, ELF2M, EpCAM, EphA2, Ephrin B2, FAP, FLT3, GD2, GD3, GM3, GPRC5D, HER2 (ERBB2/neu), IGLL1, IL-11Ra, KIT (CD117), MUC1, NCAM, PAP, PDGFR-β, PRSS21, PSCA, PSMA, ROR1, SSEA-4, TAG72, TEM1/CD248, TEM7R, TSHR, VEGFR2, ALPI, citrullinated vimentin, cMet, Axl, GPC2, human epidermal growth factor receptor 2 (Her2/neu), CD276 (B7H3), IL-13Rα1, IL-13Rα2, α-fetoprotein (AFP), carcinoembryonic antigen (CEA), cancer antigen-125 (CA-125), CA19-9, calretinin, MUC-1, epithelial membrane protein (EMA), epithelial tumor antigen (ETA), tyrosinase, melanoma-associated antigen (MAGE), CD34, CD45, CD123, CD93, CD99, CD117, chromogranin, cytokeratin, desmin, glial fibrillary acidic protein (GFAP), gross cystic disease fluid protein (GCDFP-15), ALK, DLK1, FAP, NY-ESO, WT1, HMB-45 antigen, protein melan-A (melanoma antigen recognized by T lymphocytes; MART-1), myo-D1, muscle-specific actin (MSA), neurofilament, neuron-specific enolase (NSE), placental alkaline phosphatase, synaptophysin, thyroglobulin, thyroid transcription factor-1, AOC3 (VAP-1), CAM-3001, CCL11 (eotaxin-1), CD125, CD147 (basigin), CD154 (CD40L), CD2, CD20, CD23 (IgE receptor), CD25 (a subunit of the heterodimeric IL-2 receptor), CD3, CD4, CD5, IFN-α, IFN-γ, IgE, IgE Fc region, IL-1, IL-12, IL-23, IL-13, IL-17, IL-17A, IL-22, IL-4, IL-5, IL-5, IL-6, IL-6 receptor, integrin α4, integrin α4p7, LFA-1 (CD11α), myostatin, OX-40, scleroscin, SOST, TGFβ1, TNF-α, VEGF-A, pyruvate kinase isoenzyme type M2 (tumor M2-PK), CD20, CD5, CD7, CD3, TRBC1, TRBC2, BCMA, CD38, CD123, CD93, CD34, CD1α, SLAMF7/CS1, FLT3, CD33, CD123, TALLA-1, CSPG4, DLL3, Kappa light chain, Lamba light chain, CD16/FcγRIII, CD64, FITC, CD22, CD27, CD30, CD70, GD2 (ganglioside G2), GD3, EGFRvIII (epidermal growth factor variant III), EGFR and isovariants thereof, TEM-8, sperm protein 17 (Sp17), mesothelin.

[0079] Further non-limiting examples of suitable antigens include PAP (prostatic acid phosphatase), prostate stem cell antigen (PSCA), prostein, NKG2D, TARP (T cell receptor gamma alternate reading frame protein), Trp-p8, STEAP1 (six-transmembrane epithelial antigen of the prostate 1), an abnormal ras protein, an abnormal p53 protein, integrin β (CD61), galactin, K-Ras (V-Ki-ras2 Kirsten rat sarcoma viral oncogene), Ral-B, GPC2, CD276 (B7H3), or IL-13Rα. In some embodiments, the antigen includes ALPPL2. In some embodiments, the antigen includes BCMA. In some embodiments, the antigen-binding moiety of the ECD is specific for a reporter protein, such as GFP and eGFP. Non-limiting examples of such antigen binding moiety include a LaG17 anti-GFP nanobody. In some embodiments, the antigen-binding moiety of the ECD includes an anti-BCMA fully-humanized VH domain (FHVH). In some embodiments, the antigen includes signal regulatory protein α (SIRPα).

[0080] Additional antigens suitable for targeting by the chimeric receptors disclosed herein include, but are not limited to GPC2, human epidermal growth factor receptor 2 (Her2/neu), CD276 (B7H3), IL-13Rα1, IL-13Rα2, α-fetoprotein (AFP), carcinoembryonic antigen (CEA), cancer antigen-125 (CA-125), CA19-9, calretinin, MUC-1, epithelial membrane protein (EMA), epithelial tumor antigen (ETA). Other suitable target antigens include, but are not limited to, tyrosinase, melanoma-associated antigen (MAGE), CD34, CD45, CD123, CD93, CD99, CD117, chromogranin, cytokeratin, desmin, glial fibrillary acidic protein (GFAP), gross cystic disease fluid protein (GCDFP-15), ALK, DLK1, FAP, NY-ESO, WT1, HMB-45 antigen, protein melan-A (melanoma antigen recognized by T lymphocytes; MART-1), myo-D1, muscle-specific actin (MSA), neurofilament, neuron-specific enolase (NSE), placental alkaline phosphatase, synaptophysin, thyroglobulin, thyroid transcription factor-1.

[0081] Additional antigens suitable for targeting by the chimeric receptors disclosed herein include, but are not limited to, those associated with an inflammatory disease such as, AOC3 (VAP-1), CAM-3001, CCL11 (eotaxin-1), CD125, CD147 (basigin), CD154 (CD40L), CD2, CD20, CD23 (IgE receptor), CD25 (a subunit of the heteromeric IL-2 receptor), CD3, CD4, CD5, IFN-α, IFN-γ, IgE, IgE Fc region, IL-1, IL-12, IL-23, IL-13, IL-17, IL-17A, IL-22, IL-4, IL-5, IL-5, IL-6, IL-6 receptor, integrin α4, integrin α4p7, LFA-1 (CD11α), myostatin, OX-40, scleroscin, SOST, TGFβ1, TNF-α, and VEGF-A.

[0082] Further antigens suitable for targeting by the chimeric polypeptides and synZTE-containing Notch receptors disclosed herein include, but are not limited to the pyruvate kinase isoenzyme type M2 (tumor M2-PK), CD20, CD5, CD7, CD3, TRBC1, TRBC2, BCMA, CD38, CD123, CD93, CD34, CD1α, SLAMF7/CS1, FLT3, CD33, CD123, TALLA-1, CSPG4, DLL3, Kappa light chain, Lamba light chain, CD16/FcγRIII, CD64, FITC, CD22, CD27, CD30, CD70, GD2 (ganglioside G2), GD3, EGFRvIII (epidermal growth factor variant III), EGFR and isovariants thereof, TEM-8, sperm protein 17 (Sp17), mesothelin. Additional non-limiting examples of suitable antigens include PAP (prostatic acid phosphatase), prostate stem cell antigen (PSCA), prostein, NKG2D, TARP (T cell receptor gamma alternate reading frame protein), Trp-p8, STEAP1 (six-transmembrane epithelial antigen of the prostate 1), an abnormal ras protein, an abnormal p53 protein, integrin β3 (CD61), galactin, K-Ras (V-Ki-ras2 Kirsten rat sarcoma viral oncogene), and Ral-B. In some embodiments, the antigen is GPC2, CD19, Her2/neu, CD276 (B7H3), IL-13Rα1, or IL-13Rα2.

[0083] In some embodiments, antigens suitable for targeting by the chimeric polypeptides and synZTE-containing Notch receptors disclosed herein include ligands derived from a pathogen. For example, the antigen can be HER2 produced by HER2-positive breast cancer cells. In some embodiments, the antigen can be CD19 that is expressed on B-cell leukemia. In some embodiments, the antigen can be EGFR that is expressed on glioblastoma multiform (GBM) but much less expressed so on healthy CNS tissue. In some embodiments, the antigen can be CEA that is associated with cancer in adults, for example colon cancer.

[0084] In some embodiments, the ligand is selected from the group consisting of CD1, CD1α, CD1b, CD1c, CD1d, CD1e, CD2, CD3d, CD3e, CD3g, CD4, CD5, CD7, CD8a, CD8b, CD19, CD20, CD21, CD22, CD23, CD25, CD27, CD28, CD33, CD34, CD40, CD45, CD48, CD52, CD59, CD66, CD70, CD71, CD72, CD73, CD79A, CD79B, CD80 (B7.1), CD86 (B7.2), CD94, CD95, CD134, CD140 (PDGFR4), CD152, CD154, CD158, CD178, CD181 (CXCR1), CD182 (CXCR2), CD183 (CXCR3), CD210, CD246, CD252, CD253, CD261, CD262, CD273 (PD-L2), CD274 (PD-L1), CD276 (B7H3), CD279, CD295, CD339 (JAG1), CD340 (HER2), EGFR, FGFR2, CEA, AFP, CA125, MUC-1, MAGE, alkaline phosphatase, placental-like 2 (ALPPL2), B-cell maturation antigen (BCMA), green fluorescent protein (GFP), enhanced green fluorescent protein (EGFP), and signal regulatory protein α (SIRPα). In some embodiments, the antigen-binding moiety of the ECD is specific for a cell surface target, where non-limiting examples of cell surface targets include CD19, CD30, Her2, CD22, ENPP3, EGFR, CD20, CD52, CD11α, and α-integrin. In some embodiments, the chimeric polypeptides and synZTE-containing Notch receptors disclosed herein include an ECD having an antigen-binding moiety that binds CD19, CEA, HER2, MUC1, CD20, or EGFR.

[0085] In some embodiments, the chimeric polypeptides and synZTE-containing Notch receptors disclosed herein include an ECD containing an antigen-binding moiety that binds CD19. In some embodiments, the ECD includes an amino acid sequence having at least 70%, at least 75%, at least 80%, at least 85%, at least 90%, at least 95%, at least 96%, at least 97%, at least 98%, at least 99% sequence identity to SEQ ID NO: 10 in the Sequence Listing. In some embodiments, the ECD includes an amino acid sequence having at least 90% sequence identity to SEQ ID NO: 10. In some embodiments, the ECD includes an amino acid sequence having at least 95% sequence identity to SEQ ID NO: 10. In some embodiments, the ECD includes an amino acid sequence having 100% sequence identity to SEQ ID NO: 10. In some embodiments, the ECD includes an amino acid sequence having a sequence selected from the group consisting of SEQ ID NO: 10, wherein one, two, three, four, or five of the amino acid residues in SEQ ID NO: 10 is/are substituted by a different amino acid residue.

[0086] Linking Polypeptide/JMD

[0087] As described in greater detail below, the Notch extracellular domains located N-terminally to the TMD of the chimeric polypeptide of the disclosure include a linking polypeptide sequence disposed between the extracellular binding domain (ECD) and the transmembrane domain (TMD). In some embodiments, the length and amino acid composition of the linking polypeptide sequence can be optimized to vary the orientation and/or proximity of ECD and TMD relative to one another to achieve a desired activity of the chimeric polypeptides and receptors as disclosed herein. In some embodiments, the length and amino acid composition of the linking polypeptide sequence can be varied as a “tuning” tool to achieve a tuning effect that would enhance or reduce the biological activity of the disclosed chimeric polypeptides and receptors. Additional information regarding the relative glycine content, length, amino acid composition, and the flexibility/stiffness of glycerin-serine linking polypeptide can be determined by any methodologies known in the art as suitable for such purposes, for example as determined by Förster resonance energy transfer (FRET) efficiencies as described in Rosmalen M. et al., Biochemistry (2017), 56:6565-74.

[0088] In some embodiments, an single-chain peptide including about two to 100 amino acid residues (aa) e.g., 4, 5, 6, 7, 8, 9, 10, 11, 12, 13, 14, 15, 16, 17, 18, 19, 20, etc. amino acid residues) is used as a linking polypeptide in the disclosed chimeric receptors. In some embodiments, the linking polypeptide sequence has a length ranging from about 5 to about 50, about 10 to about 60, about 20 to about 70, about 30 to about 80, about 40 to about 90, about 50 to about 100, about 60 to about 80, about 70 to about 100, about 30 to about 60, about 20 to about 80, about 30 to about 90 amino acid residues. In some embodiments, the linking polypeptide sequence has a length ranging from about 1 to about 10, about 5 to about 15, about 10 to about 20, about 15 to about 25, about 20 to about 40, about 30 to about 50, about 40 to about 60, about 50 to about 70 amino acid residues. In some embodiments, the linking polypeptide sequence has a length ranging from about 40 to about 70, about 50 to about 80, about 60 to 8 about 0, about 70 to about 90, or about 80 to about 100 amino acid residues. In some embodiments, the linking polypeptide sequence has a length ranging from about 1 to about 10, about 5 to about 15, about 10 to about 20, about 15 to about 25 amino acid residues.

[0089] In some embodiments, the linking polypeptide sequence has a length ranging from about 1 to about 40 amino acid residues. In some embodiments, the linking polypeptide sequence has a length ranging from 1 to about 10, about 5 to about 20, about 10 to about 30, about 15 to about 40, about 10 to about 40, about 15 to about 40, about 20 to about 40, about 25 to about 40, about 30 to about 40, about 5 to about 0, about 15 to about 30 amino acid residues. In some embodiments, the linking polypeptide sequence has a length ranging from about 5 to about 40, about 10 to about 35, about 15 to about 35, about 20 to about 35, about 5 to about 20, about 5 to about 25, about 5 to about 30, about 5 to about 35 amino acid residues.

[0090] In certain embodiments, the linking polypeptide contains only glycine and/or serine residues (e.g., glycine-serine linking polypeptide). Examples of such linking polypeptides include: Gly, Ser; Gly Gly Ser; Ser Gly Gly; Gly Ser Gly; Gly Gly Gly Ser (SEQ ID NO: 80); Ser Gly Gly Gly (SEQ ID NO: 81); Ser Gly Ser Gly (SEQ ID NO: 82); Gly Gly Gly Gly Ser (SEQ ID NO: 83); Ser Gly Gly Gly Gly (SEQ ID NO: 84); Gly Gly Gly Gly Gly Ser (SEQ ID NO: 85); Ser Gly Gly Gly Gly Gly (SEQ ID NO: 86); Gly Gly Gly Gly Gly Gly Ser (SEQ ID NO: 87); Ser Gly Gly Gly Gly Gly Gly (SEQ ID NO: 88); (Gly Gly Gly Gly Ser)n (SEQ ID NO: 89), wherein n is an integer of one or more; and (Ser Gly Gly Gly Gly)n (SEQ ID NO: 90), wherein n is an integer of one or more. In some embodiments, the linking polypeptide sequence includes at least one glycine residue. In some embodiments, the linking polypeptide sequence includes at least one serine residue. In some embodiments, the linking polypeptide sequences are modified such that the amino acid sequence Gly Ser Gly (GSG) (that occurs at the junction of traditional Gly/Ser linker polypeptide repeats) is not present. For example, in some embodiments, the linking polypeptide includes an amino acid sequence selected from the group consisting of: (GGGXX)nGGGGS (SEQ ID NO: 91) and GGGGS(XGGGS)n (SEQ ID NO: 92), where X is any amino acid that can be inserted into the sequence and not result in a polypeptide comprising the sequence GSG, and n is 0 to 4. In some embodiments, the sequence of a linking polypeptide is (GGGX1X2)nGGGGS (SEQ ID NO: 93) and X1 is P and X2 is S and n is 0 to 4. In some embodiments, the sequence of a linking polypeptide is (GGGX1X2)nGGGGS (SEQ ID NO: 94) and X1 is G and X2 is Q and n is 0 to 4. In some other embodiments, the sequence of a linking polypeptide is (GGGX1X2)nGGGGS (SEQ ID NO: 95) and X1 is G and X2 is A and n is 0 to 4. In some embodiments, the sequence of a linking polypeptide is GGGGS(XGGGS)n (SEQ ID NO: 96), and X is P and n is 0 to 4. In some embodiments, a linking polypeptide of the disclosure comprises or consists of the amino acid sequence (GGGGA)₂GGGGS (SEQ ID NO: 97). In some embodiments, a linking polypeptide comprises or consists of the amino acid sequence (GGGGQ)₂GGGGS (SEQ ID NO: 98). In some embodiments, a linking polypeptide comprises or consists of the amino acid sequence (GGGPS)₂GGGGS (SEQ ID NO: 99). In some embodiments, a linking polypeptide comprises or consists of the amino acid sequence GGGGS(PGGGS)₂ (SEQ ID NO: 100).

[0091] In some embodiments, a linking polypeptide the amino acid sequence (GGS)n wherein n is an integer from 1 to 50, for example, from 1 to 10, from 5 to 15, from 10 to 20, from 15 to 25, from 20 to 30, from 25 to 35, from 30 to 40, from 35 to 45, or from 40 to 50. In some embodiments, a linking polypeptide the amino acid sequence (GGS)n wherein n is an integer from 1 to 10. In some embodiments, a linking polypeptide the amino acid sequence (GGS)n wherein n is an integer from 10 to 20. In some embodiments, a linking polypeptide the amino acid sequence (GGS)n wherein n is an integer from 20 to 30. In some embodiments, a linking polypeptide the amino acid sequence (GGS)n wherein n is an integer from 30 to 40. In some embodiments, a linking polypeptide the amino acid sequence (GGS)n wherein n is an integer from 40 to 50. In some embodiments, n is 18, i.e., (GGS)₁₈. In some embodiments, n is 15, i.e., (GGS)₁₅. In some embodiments, n is 12, i.e., (GGS)₁₂. In some embodiments, n is 9, i.e., (GGS)₉. In some embodiments, n is 6, i.e., (GGS)₆. In some embodiments, n is 3, i.e., (GGS)₃. In some embodiments, the sequence is selected so that it does not include a common protease cleavage site. In some embodiments, the sequence is selected so that it does not include a glycosylation site.

[0092] In some embodiments, a linking polypeptide comprises or consists of an amino acid sequence having at least 80% sequence identity, such as, at least 80%, at least 85%, at least 90%, at least 95%, at least 96%, at least 97%, at least 98%, or 99% sequence identity to a sequence set forth in SEQ ID NOS: 25-28 in the Sequence Listing. In some embodiments, a linking polypeptide comprises or consists of an amino acid sequence having at least 80% sequence identity to a sequence set forth in SEQ ID NOS: 25-28. In some embodiments, a linking polypeptide comprises or consists of an amino acid sequence having at least 90% sequence identity to a sequence set forth in SEQ ID NOS: 25-28. In some embodiments, a linking polypeptide comprises or consists of an amino acid sequence having at least 95% sequence identity to a sequence set forth in SEQ ID NOS: 25-28. In some embodiments, a linking polypeptide comprises or consists of an amino acid sequence having about 100% sequence identity to a sequence set forth in SEQ ID NOS: 25-28. In some embodiments, a linking polypeptide comprises or consists of an amino acid sequence selected from the group consisting of SEQ ID NOS: 25-28, wherein one, two, three, four, or five of the amino acid residues in any one of SEQ ID NOS: 25-28 is/are substituted by a different amino acid residues.

[0093] In some embodiments, the linking polypeptide has substantial sequence identity with a Notch receptor JMD which is partly or completely devoid of the NRR and/or the HD. In some embodiments, the linking polypeptide has at least about 80%, 85%, 90%, 95%, 96%, 97%, 98%, 99%, or 100% sequence identity to a Notch JMD wherein a LNR and/or a HD of a Notch receptor has been deleted. In some embodiments, the linking polypeptide has at least about 80%, 85%, 90%, 95%, 96%, 97%, 98%, 99%, or 100% sequence identity to a Notch JMD wherein at least one LNR of a Notch receptor has been deleted. In some embodiments, the linking polypeptide has at least about 80%, 85%, 90%, 95%, 96%, 97%, 98%, 99%, or 100% sequence identity to a Notch JMD wherein at least two LNRs of a Notch receptor has been deleted. In some embodiments, the linking polypeptide has at least about 80%, 85%, 90%, 95%, 96%, 97%, 98%, 99%, or 100% sequence identity to a Notch JMD wherein one, or two, or all three LNRs of a Notch receptor has been deleted. In some embodiments, the linking polypeptide has at least about 80%, 85%, 90%, 95%, 96%, 97%, 98%, 99%, or 100% sequence identity to a Notch JMD which does not include a Notch NRR or HD of a Notch receptor, e.g., complete absence of the Notch extracellular subunit (NEC).

[0094] In some embodiments, the linker polypeptide sequence includes a sequence having at least 80% sequence identity, such as, at least 80%, at least 85%, at least 90%, at least 95%, at least 96%, at least 97%, at least 98%, or 99% sequence identity to a N-JMD sequence selected from the group consisting of SEQ ID NOS: 11-18 in the Sequence Listing. In some embodiments, the linker polypeptide sequence includes an amino acid sequence having at least 90% sequence identity to a N-JMD domain selected from the group consisting of SEQ ID NOS: 11-18. In some embodiments, the linker polypeptide sequence includes an amino acid sequence having at least 95% sequence identity to a N-JMD domain selected from the group consisting of SEQ ID NOS: 19-27. In some embodiments, the linker polypeptide sequence includes an amino acid sequence having about 100% sequence identity to a N-JMD domain selected from the group consisting of SEQ ID NOS: 19-27. In some embodiments, the linker polypeptide sequence includes a N-JMD domain having a sequence selected from the group consisting of SEQ ID NOS: 11-18, wherein one, two, three, four, or five of the amino acid residues in any one of the SEQ ID NOS: 11-18 is/are substituted by a different amino acid residue.

[0095] Hinge Domain

[0096] As described in greater detail herein, the linking polypeptide of the chimeric Notch receptors in accordance with some embodiments of the disclosure incorporate an extracellular oligomerization domain to promote formation of oligomeric forms, e.g., dimeric or trimeric form of the chimeric receptors. It is believed, without being bound by any theory, that this design allows oligomerization/clustering of extracellular domains (ECD) and subsequently brings together intracellular domains (ICD) to activate cell signaling, e.g. T-cell signaling. In these instances, the Notch ECDs located N-terminally to the TMD include an oligomerization domain (e.g., a polypeptide hinge domain) containing one or more polypeptide motifs that promote oligomer formation of the chimeric polypeptides via intermolecular disulfide bonding. In these instances, the hinge domain generally includes a flexible oligo- or polypeptide connector region disposed between the ECD and the TMD. Thus, the polypeptide hinge domain provides flexibility between the ECD and TMD and also provides sites for intermolecular disulfide bonding between two or more chimeric polypeptide monomers to form an oligomeric complex. In some embodiments, the hinge domain includes motifs that promote dimer formation of the chimeric polypeptides disclosed herein. In some embodiments, the hinge domain includes motifs that promote trimer formation of the chimeric polypeptides disclosed herein (e.g., a hinge domain derived from OX40).

[0097] Hinge polypeptide sequences suitable for the compositions and methods of the disclosure can be naturally-occurring hinge polypeptide sequences (e.g., those from naturally-occurring immunoglobulins). Alternatively, a hinge polypeptide sequence can be a synthetic sequence that corresponds to a naturally-occurring hinge polypeptide sequence, or can be an entirely synthetic hinge sequence, or can be engineered, designed, or modified to provide desired and/or improved properties, e.g., modulating transcription. Suitable hinge polypeptide sequences include, but are not limited to, those derived from IgA, IgD, and IgG subclasses, such as IgG1 hinge domain, IgG2 hinge domain, IgG3 hinge domain, and IgG4 hinge domain, or a functional variant thereof. In some embodiments, the hinge polypeptide sequence contains one or more CXXC motifs. In some embodiments, the hinge polypeptide sequence contains one or more CPPC motifs. Additional information in this regard can be found in, for example, a recent review by Vidarsson G. et al., Frontiers Immunol. (Oct. 20, 2014) 5:520, which is hereby incorporated by reference in its entirety.

[0098] Accordingly, in some embodiments, the hinge domain of the chimeric Notch receptors disclosed herein includes a hinge polypeptide sequence derived from an IgG1 hinge domain or a functional variant thereof. In some embodiments, the hinge domain includes a hinge polypeptide sequence derived from an IgG2 hinge domain or a functional variant thereof. In some embodiments, the hinge domain includes a hinge polypeptide sequence derived from an IgG3 hinge domain or a functional variant thereof. In some embodiments, the hinge domain includes a hinge polypeptide sequence derived from an IgG4 hinge domain or a functional variant thereof. In some embodiments, the hinge domain includes a hinge polypeptide sequence derived from an IgA hinge domain or a functional variant thereof. In some embodiments, the hinge domain includes a hinge polypeptide sequence derived from an IgD hinge domain or a functional variant thereof.

[0099] Additional hinge polypeptide sequences suitable for the compositions and methods disclosed herein include, but are not limited to, hinge polypeptide sequences derived from a CD8α hinge domain, a CD28 hinge domain, a CD152 hinge domain, a PD-1 hinge domain, a CTLA4 hinge domain, an OX40 hinge domain, an FcγRIIIα hinge domain, and functional variants thereof. In some embodiments, the hinge domain includes a hinge polypeptide sequence derived from a CD8α hinge domain or a functional variant thereof. In some embodiments, the hinge domain includes a hinge polypeptide sequence derived from a CD28 hinge domain or a functional variant thereof. In some embodiments, the hinge domain includes a hinge polypeptide sequence derived from an OX40 hinge domain or a functional variant thereof. In some embodiments, the hinge domain includes a hinge polypeptide sequence derived from an IgG4 hinge domain or a functional variant thereof.

[0100] The length and/or amino acid composition of the hinge domain are selected to confer flexibility and the capacity for oligomerization. One skilled in the art will readily appreciate that the length and amino acid composition of the hinge polypeptide sequence can be optimized to vary the orientation and/or proximity of the ECD and the TMD relative to one another, as well as of the chimeric polypeptide monomers to one another, to achieve a desired activity of the chimeric polypeptide of the disclosure. In some embodiments, a single-chain peptide including about one to 100 amino acid residues (e.g., 2, 3, 4, 5, 6, 7, 8, 9, 10, 11, 12, 13, 14, 15, 16, 17, 18, 19, 20, etc. amino acid residues) can be used as a hinge domain. In some embodiments, the hinge domain includes about 5 to 50, about 10 to 60, about 20 to 70, about 30 to 80, about 40 to 90, about 50 to 100, about 60 to 80, about 70 to 100, about 30 to 60, about 20 to 80, about 30 to 90 amino acid residues. In some embodiments, the hinge domain includes about 1 to 10, about 5 to 15, about 10 to 20, about 15 to 25, about 20 to 40, about 30 to 50, about 40 to 60, about 50 to 70 amino acid residues. In some embodiments, the hinge domain includes about 40 to 70, about 50 to 80, about 60 to 80, about 70 to 90, or about 80 to 100 amino acid residues. In some embodiments, the hinge domain includes about 1 to 10, about 5 to 15, about 10 to 20, about 15 to 25 amino acid residues. In some embodiments, the hinge domain includes a sequence having at least 80% sequence identity, such as, at least 80%, at least 85%, at least 90%, at least 95%, at least 96%, at least 97%, at least 98%, or 99% sequence identity to a sequence selected from the group consisting of SEQ ID NOS: 20-24 in the Sequence Listing. In some embodiments, the hinge domain includes an amino acid sequence having at least 90% sequence identity to a sequence selected from the group consisting of SEQ ID NOS: 20-24. In some embodiments, the hinge domain includes an amino acid sequence having at least 95% sequence identity to a sequence selected from the group consisting of SEQ ID NOS: 20-24. In some embodiments, the hinge domain includes an amino acid sequence having about 100% sequence identity to a sequence selected from the group consisting of SEQ ID NOS: 20-24. In some embodiments, the hinge domain includes an amino acid sequence having a sequence selected from the group consisting of SEQ ID NOS: 20-24, wherein one, two, three, four, or five of the amino acid residues in any one of the SEQ ID NOS: 20-24 is/are substituted by a different amino acid residue.

[0101] Transmembrane Domain (TMD)

[0102] As described in greater detail herein, the chimeric polypeptides and the engineered Notch receptors of the disclosure include a transmembrane domain having at least about 80% sequence identity to the TMD of a Type 1 transmembrane receptor and including one or more ligand-inducible proteolytic cleavage sites.

[0103] Examples of ligand-inducible proteolytic cleavage sites in a Notch receptor (e.g., S2 or S3) are as described above. Additional proteolytic cleavage sites suitable for the compositions and methods disclosed herein include, but are not limited to, a metalloproteinase cleavage site for a matrix metalloproteinase (MMP) selected from collagenase-1, -2, and -3 (MMP-1, -8, and -13), gelatinase A and B (MMP-2 and -9), stromelysin 1, 2, and 3 (MMP-3, -10, and -11), matrilysin (MMP-7), and membrane metalloproteinases (MT1-MMP and MT2-MMP). For example, the cleavage sequence of MMP-9 is Pro-X-X-Hy (SEQ ID NO: 101) (wherein, X represents any residue; Hy, a hydrophobic residue), e.g., Pro-X-X-Hy-(Ser/Thr) (SEQ ID NO: 102), e.g., Pro-Leu/Gln-Gly-Met-Thr-Ser (SEQ ID NO: 103) or Pro-Leu/Gln-Gly-Met-Thr (SEQ ID NO: 104). Another example of a suitable protease cleavage site is a plasminogen activator cleavage site, e.g., a urokinase plasminogen activator (uPA) or a tissue plasminogen activator (tPA) cleavage site. Another example of a suitable protease cleavage site is a prolactin cleavage site. Specific examples of cleavage sequences of uPA and tPA include sequences including Val-Gly-Arg (SEQ ID NO: 105). Another example of a protease cleavage site that can be included in a proteolytically cleavable linker is a tobacco etch virus (TEV) protease cleavage site, e.g., Glu-Asn-Leu-Tyr-Thr-Gln-Ser (SEQ ID NO: 106), where the protease cleaves between the glutamine and the serine. Another example of a protease cleavage site that can be included in a proteolytically cleavable linker is an enterokinase cleavage site, e.g., Asp-Asp-Asp-Asp-Lys (SEQ ID NO: 107), where cleavage occurs after the lysine residue. Another example of a protease cleavage site that can be included in a proteolytically cleavable linker is a thrombin cleavage site, e.g., Leu-Val-Pro-Arg (SEQ ID NO: 108). Additional suitable linkers including protease cleavage sites include sequences cleavable by the following proteases: a PreScission™ protease (a fusion protein including human rhinovirus 3C protease and glutathione-S-transferase), a thrombin, cathepsin B, Epstein-Barr virus protease, MMP-3 (stromelysin), MMP-7 (matrilysin), MMP-9; thermolysin-like MMP, matrix metalloproteinase 2 (MMP-2), cathepsin L; cathepsin D, matrix metalloproteinase 1 (MMP-1), urokinase-type plasminogen activator, membrane type 1 matrix metalloproteinase (MT-MMP), stromelysin 3 (or MMP-11), thermolysin, fibroblast collagenase and stromelysin-1, matrix metalloproteinase 13 (collagenase-3), tissue-type plasminogen activator (tPA), human prostate-specific antigen, kallikrein (hK3), neutrophil elastase, and calpain (calcium activated neutral protease). Proteases that are not native to the cell in which the receptor is expressed (for example, TEV) can be used as a further regulatory mechanism, in which activation of the synthetic Notch receptor of the disclosure is reduced until the protease is expressed or otherwise provided. Additionally, a protease may be tumor-associated or disease-associated (expressed to a significantly higher degree than in normal tissue), and serve as an independent regulatory mechanism. For example, some matrix metalloproteases are highly expressed in certain cancer types.

[0104] Generally, the TMD suitable for the chimeric receptors disclosed herein can be any transmembrane domain of a Type 1 transmembrane receptor including at least one γ-secretase cleavage site. Detailed description of the structure and function of the γ-secretase complex as well as its substrate proteins, including amyloid precursor protein (APP) and Notch, can, for example, be found in a recent review by Zhang et al., Frontiers Cell Neurosci (2014). Non-limiting suitable TMDs from Type 1 transmembrane receptors include those from CLSTN1, CLSTN2, APLP1, APLP2, LRP8, APP, BTC, TGBR3, SPN, CD44, CSF1R, CXCL16, CX3CL1, DCC, DLL1, DSG2, DAG1, CDH1, EPCAM, EPHA4, EPHB2, EFNB1, EFNB2, ErbB4, GHR, HLA-A, and IFNAR2, wherein the TMD includes at least one γ-secretase cleavage site. Additional TMDs suitable for the compositions and methods described herein include, but are not limited to, transmembrane domains from Type 1 transmembrane receptors IL1R1, IL1R2, IL6R, INSR, ERN1, ERN2, JAG2, KCNE1, KCNE2, KCNE3, KCNE4, KL, CHL1, PTPRF, SCN1B, SCN3B, NPR3, NGFR, PLXDC2, PAM, AGER, ROBO1, SORCS3, SORCS1, SORL1, SDC1, SDC2, SPN, TYR, TYRP1, DCT, VASN, FLT1, CDH5, PKHD1, NECTIN1, PCDHGC3, NRG1, LRP1B, CDH2, NRG2, PTPRK, SCN2B, Nradd, and PTPRM. In some embodiments, the TMD of the chimeric polypeptides or Notch receptors of the disclosure is a TMD derived from the TMD of a member of the calsyntenin family, such as, alcadein alpha and alcadein gamma. In some embodiments, the TMD of the chimeric polypeptides or Notch receptors of the disclosure is a TMD derived from a different Notch receptor. For example, in a synthetic Notch receptor based on human Notch1, the Notch1 TMD can be substituted with a human Notch2 TMD, human Notch3 TMD, human Notch4 TMD, or a Notch TMD from a non-human animal such as Danio rerio, Drosophila melanogaster, Xenopus laebis, or Gallus.

[0105] Accordingly, in some embodiments, the transmembrane domain includes an amino acid sequence exhibiting at least 70%, at least 75%, at least 80%, at least 85%, at least 90%, at least 95%, at least 96%, at least 97%, at least 98%, at least 99% sequence identity to a polypeptide sequence having at least about 70% sequence identity to a transmembrane domain from a Type 1 transmembrane receptor that includes a γ-secretase cleavage site. In some embodiments, the transmembrane domain includes an amino acid sequence exhibiting at least 70% sequence identity to a transmembrane domain from a Type 1 transmembrane receptor that includes a γ-secretase cleavage site. In some embodiments, the transmembrane domain includes an amino acid sequence exhibiting at least about 80% sequence identity to a transmembrane domain from a Type 1 transmembrane receptor that includes a γ-secretase cleavage site. In some embodiments, the transmembrane domain includes an amino acid sequence exhibiting at least about 90% sequence identity to a transmembrane domain from a Type 1 transmembrane receptor that includes a γ-secretase cleavage site. In some embodiments, the transmembrane domain includes an amino acid sequence exhibiting at least about 95% sequence identity to a transmembrane domain from a Type 1 transmembrane receptor that includes a γ-secretase cleavage site. In some embodiments, the Type 1 transmembrane receptor is selected from the group consisting of CLSTN1, CLSTN2, APLP1, APLP2, LRP8, APP, BTC, TGBR3, SPN, CD44, CSF1R, CXCL16, CX3CL1, DCC, DLL1, DSG2, DAG1, CDH1, EPCAM, EPHA4, EPHB2, EFNB1, EFNB2, ErbB4, GHR, HLA-A, IFNAR2, IL1R1, IL1R2, IL6R, INSR, ERN1, ERN2, JAG2, KCNE1, KCNE2, KCNE3, KCNE4, KL, CHL1, PTPRF, SCN1B, SCN3B, NPR3, NGFR, PLXDC2, PAM, AGER, ROBO1, SORCS3, SORCS1, SORL1, SDC1, SDC2, SPN, TYR, TYRP1, DCT, VASN, FLT1, CDH5, PKHD1, NECTIN1, PCDHGC3, NRG1, LRP1B, CDH2, NRG2, PTPRK, SCN2B, Nradd, and PTPRM.

[0106] In some embodiments, the TMD includes an amino acid sequence exhibiting at least 70%, at least 75%, at least 80%, at least 85%, at least 90%, at least 95%, at least 96%, at least 97%, at least 98%, at least 99% sequence identity to one or more of SEQ ID NOS: 29-38 in the Sequence Listing. In some embodiments, the transmembrane domain includes an amino acid sequence having at least 90% sequence identity to a sequence selected from the group consisting of SEQ ID NOS: 29-38. In some embodiments, the transmembrane domain includes an amino acid sequence having at least 95% sequence identity to a sequence selected from the group consisting of SEQ ID NOS: 29-38. In some embodiments, the transmembrane domain includes an amino acid sequence having about 100% sequence identity to one or more of SEQ ID NOS: 29-38. In some embodiments, the transmembrane domain includes an amino acid sequence having a sequence selected from the group consisting of SEQ ID NOS: 29-38, wherein one, two, three, four, or five of the amino acid residues in any one of the SEQ ID NOS: 29-38 is/are substituted by a different amino acid residue.

[0107] In some embodiments, the amino acid substitution(s) within the TMD includes one or more substitutions within a “GV” motif of the TMD. In some embodiments, at least one of such substitution(s) is a substitution to alanine.

[0108] Stop-Transfer-Sequence (STS)

[0109] In some embodiments, the chimeric polypeptides and synZTE-containing Notch receptors of the disclosure include a stop-transfer-sequence (STS) which constitutes a highly-charged domain located C-terminally to the TMD. Without being bound to any particular theory, such a highly-charged domain disposed between the TMD and the ICD prevents the ICD from entering the membrane. The STS is linked to the TMD and the ICD in the following order, from N-terminus to C-terminus, TMD-STS-ICD. The length and/or amino acid composition of the STS can be selected to achieve the desired receptor sensitivity. In some embodiments, a single-chain peptide including about 4 to about 40 amino acid residues (e.g., 4, 5, 6, 7, 8, 9, 10, 11, 12, 13, 14, 15, 16, 17, 18, 19, or 20, etc. amino acid residues) can be used as a STS. In some embodiments, the STS includes about 4 to 15, about 6 to 20, about 8 to 25, about 10 to 30, about 12 to 35, about 14 to 40, about 5 to 40, about 10 to 35, about 15 to 30, about 20 to 25, about 20 to 40, about 10 to 30, about 4 to 20, or about 5 to 25 amino acid residues. In some embodiments, the STS includes about 4 to 10, about 5 to 12, about 6 to 14, about 7 to 18, about 8 to 20, about 9 to 22, about 10 to 24, or about 11 to 26 amino acid residues. In some embodiments, the STS includes about 4 to 10 residues, such as, 4, 5, 6, 7, 8, 9, or 10 amino acid residues.

[0110] In some embodiments, the STS comprises a sequence having at least 70% sequence identity, such as, at least 70%, at least 75%, at least 80%, at least 85%, at least 90%, at least 95%, at least 96%, at least 97%, at least 98%, or 99% sequence identity to a STS sequence from Notch1, Notch2, Notch3, Notch4, CSF1R, CXCL16, DAG1, GHR, PTPRF, AGER, KL, NRG1, LRP1B, Jag2, EPCAM, KCNE3, CDH2, NRG2, PTPRK, BTC, EPHA3, IL1R2, or PTPRM. In some embodiments, the STS comprises a sequence comprising only Lys (K) or Arg (R) in the first 4 residues. In some embodiments, the STS comprises one, two, three, four, five, or more basic residues. In some embodiments, the STS comprises five, four, three, two, one, or zero aromatic residues or residues with hydrophobic and/or bulky side chains.

[0111] In some embodiments, the STS includes a sequence having at least 80% sequence identity, such as, at least 80%, at least 85%, at least 90%, at least 95%, at least 96%, at least 97%, at least 98%, or 99% sequence identity to a sequence selected from the group consisting of SEQ ID NOS: 39-54 in the Sequence Listing. In some embodiments, the STS includes an amino acid sequence having at least 90% sequence identity to a sequence selected from the group consisting of SEQ ID NOS: 39-54. In some embodiments, the STS includes an amino acid sequence having at least 95% sequence identity to a sequence selected from the group consisting of SEQ ID NOS: 39-54. In some embodiments, the STS includes an amino acid sequence having about 100% sequence identity to a sequence selected from the group consisting of SEQ ID NOS: 39-54. In some embodiments, the STS includes an amino acid sequence having a sequence selected from the group consisting of SEQ ID NOS: 39-54, wherein one, two, three, four, or five of the amino acid residues in any one of the SEQ ID NOS: 39-54 is/are substituted by a different amino acid residue.

[0112] Intracellular Domain

[0113] The chimeric polypeptides and engineered Notch receptors of the disclosure include a transcriptional effector. The transcriptional effector of the disclosure is a polypeptide element that acts to activate or inhibit the transcription of a promoter-driven DNA sequence. Transcriptional effectors suitable for the compositions and methods of the disclosure can be naturally-occurring transcriptional regulators or can be engineered, designed, or modified so as to provide desired and/or improved properties, e.g., modulating transcription. As discussed above, the engineered Notch receptors of the present disclosure are advantageous in that they can provide the ability to trigger a custom transcriptional program in engineered cells. In some embodiments, transcriptional effector of the disclosure is a custom transcriptional regulator that drives transcription off a specific sequence that only appears once in the engineered cell.

[0114] In some embodiments, the engineered Notch receptors of the disclosure include a zinc finger-containing transcriptional effector (ZTE) which includes one or more zinc finger motifs (ZF). A ZF is a finger-shaped fold in a protein that permits it to interact with nucleic acid sequences such as DNA and RNA. Such finger-shaped fold is well known in the art. The fold is generally created by the binding of specific amino acids in the protein to a zinc atom, and is stabilized by the co-ordination of a zinc ion between four largely invariant (depending on zinc finger framework type) Cys and/or His residues.

[0115] The term “motif” as used herein refers to a structural motif. A ZF motif is a relatively small polypeptide domain having a supersecondary structure, and includes approximately 30 amino acids and folds to form an α-helix adjacent an antiparallel β-sheet (known as a ββα-fold), and is stabilized by a zinc ion. A ZF domain recognizes and binds to a nucleic acid triplet, or an overlapping quadruplet (as explained below), in a double-stranded DNA target sequence. Naturally-occurring zinc finger domains (also known as ZF proteins) have been well studied and described in the literature. Natural ZF proteins can regulate the expression of genes as well as nucleic acid recognition, reverse transcription and virus assembly. Additional information in this regard can be found in, for example, U.S. Pat. No. 10,138,493, which is expressly incorporated herein by reference.

[0116] C₂H₂ zinc fingers (C₂H₂-ZFs) are among the most prevalent type of vertebrate DNA-binding domain, and generally appear in tandem arrays (ZFAs), with sequential C₂H₂-ZFs each contacting three (or more) sequential bases. C₂H₂-ZFs can be assembled in a modular fashion. Given a set of modules with defined three-base specificities, modular assembly also presents a way to construct artificial proteins with specific DNA-binding preferences.

[0117] ZF-containing proteins generally contain strings or chains of ZF motifs, forming an array of ZF (ZFA). Thus, a ZF protein may include two or more ZFs, e.g., a ZFA consisting of 2 or more ZF motifs, which may be directly adjacent one another (e.g., separated by a short linker sequence), or may be separated by longer, flexible or structured polypeptide sequences. For example, a ZFA can have six ZF motifs (a 6-finger ZFA), seven ZF motifs (a 7-finger ZFA), or eight ZF motifs (an 8-finger ZFA), arranged in tandem. Directly adjacent ZF domains are generally expected to bind to contiguous nucleic acid sequences, e.g., to adjacent trinucleotides/triplets. In some cases, cross-binding may also occur between adjacent ZF and their respective target triplets, which may help to strengthen or enhance the recognition of the target sequence, and leads to the binding of overlapping quadruplet sequences. By comparison, distant ZF domains within the same protein may recognize, and/or bind to, non-contiguous nucleic acid sequences or even to different molecules (e.g., protein rather than nucleic acid).

[0118] In some embodiments, the engineered Notch receptors of the disclosure include a zinc finger-containing transcriptional effector (ZTE) having a DNA binding zinc finger protein domain (ZF protein domain) and another domain through which the protein exerts its effect (effector domain). As described in further detail below, exemplary effector domains suitable for the engineered Notch receptors of the disclosure include, but are not limited to, transcriptional activating domains, transcriptional repressor domains, epigenetic effector domains, and DNA modifying enzymes.

[0119] In some embodiments, the engineered Notch receptors of the disclosure include a ZTE with two or more, e.g., 3 or more, for example, 4 or more, 5 or more, 6 or more, 7 or more, 8 or more, 9 or more, 10 or more, 11 or more, 12 or more, 13 or more, 14 or more, 15 or more, 16 or more, 17 or more, 18 or more (e.g., up to approximately 30 or 32) ZF motifs arranged adjacent one another in tandem, forming arrays of ZF motifs or ZFA. In some embodiments, the ZTE includes at least 3 ZF motifs, at least 4 ZF motifs, at least 5 ZF motifs, or at least 6 ZF motifs, at least 7 ZF motifs, at least 8 ZF motifs, at least 9 ZF motifs, at least 10 ZF motifs, at least 11 or at least 12 ZF motifs; and in some cases at least 18 ZF motifs. In some embodiments, the ZTE of the engineered Notch receptors disclosed herein contains up to 6, 7, 8, 10, 11, 12, 16, 17, 18, 22, 23, 24, 28, 29, 30, 34, 35, 36, 40, 41, 42, 46, 47, 48, 54, 55, 56, 58, 59, or 60 ZF motifs. In some embodiments, the ZTE of the disclosure bind to orthogonal target nucleic acid binding sites. That is, the ZFs or ZFAs in ZF domain of the ZTE binds orthogonal target nucleic acid sequences. In some embodiments, the orthogonal target nucleic acid binding sites are contiguous. In some embodiments, the ZTE of the engineered Notch receptors disclosed herein binds target orthogonal specific DNA sequences and have, for example, reduced or minimal functional binding potential in a eukaryotic genome.

[0120] In some embodiments of the disclosure, the ZTE includes: (a) a first domain including a DNA-binding zinc finger protein domain (ZF protein domain), and (b) a second domain through which the ZTE exerts its effect (effector domain), wherein the ZTE has the following formula I:

[effector domain]ₐ-[ZF protein domain]-[effector domain]_{b} (Formula I)

[0121] wherein a and b are each independently an integer from 0 to 5, and at least one of a and b is not 0; wherein the ZF protein domain includes 1 to about 10 zinc finger arrays (ZFA); wherein the ZFA includes about 6 to about 8 zinc finger motifs according to formula II (from N-terminal to C-terminal):

X_{c}CX_{d}CXₑ-(helix)-HX_{f}H-L² (Formula II)

[0122] wherein L² is a linker peptide having about 4-6 amino acid residues, C is Cys, H is His, each X is independently any amino acid, c is an integer from 0 to 3, d is an integer from 1 to 5, e is an integer from 2 to 7, f is an integer from 3 to 6, and (helix) is a peptide domain of about 6 amino acids that forms an α-helix, wherein the ZFA is capable of binding a specific nucleic acid sequence.

[0123] In some embodiments, the ZF protein domain of the engineered Notch receptors disclosed herein includes 1 to about 10 ZFA, each of which independently includes a sequence having at least about 90% identity to a sequence selected from the group consisting of SEQ ID NOS: 55-60. In some embodiments, the ZFA includes a sequence having at least about 90%, at least about 95%, at least about 96%, at least about 97%, at least about 98%, or at least about 99% sequence identity to a sequence selected from the group consisting of SEQ ID NOS: 55-60. In some embodiments, the ZFA sequence has at least about 90%, at least about 95%, at least about 96%, at least about 97%, at least about 98%, or at least about 99% sequence identity to the sequence of SEQ ID NO: 55 (ZF2). In some embodiments, the ZFA sequence has at least about 90%, at least about 95%, at least about 96%, at least about 97%, at least about 98%, or at least about 99% sequence identity to the sequence of SEQ ID NO: 56 (ZF3). In some embodiments, the ZFA sequence has at least about 90%, at least about 95%, at least about 96%, at least about 97%, at least about 98%, or at least about 99% sequence identity to the sequence of SEQ ID NO: 57 (ZF4). In some embodiments, the ZFA sequence has at least about 90%, at least about 95%, at least about 96%, at least about 97%, at least about 98%, or at least about 99% sequence identity to the sequence of SEQ ID NO: 58 (ZF6). In some embodiments, the ZFA sequence has at least about 90%, at least about 95%, at least about 96%, at least about 97%, at least about 98%, or at least about 99% sequence identity to the sequence of SEQ ID NO: 59 (ZF10). In some embodiments, the ZFA sequence has at least about 90%, at least about 95%, at least about 96%, at least about 97%, at least about 98%, or at least about 99% sequence identity to the sequence of SEQ ID NO: 60 (ZF11).

[0124] In some embodiments, the ZF protein domain of the engineered Notch receptors disclosed herein includes 1 to about 10 ZFA, each of which independently includes a sequence having about 100% sequence identity to a sequence selected from the group consisting of SEQ ID NOS: 55-60. In some embodiments, the ZFA sequence has about 100% sequence identity to the sequence of SEQ ID NO: 55 (ZF2). In some embodiments, the ZFA sequence has about 100% sequence identity to the sequence of SEQ ID NO: 56 (ZF3). In some embodiments, the ZFA sequence has about 100% sequence identity to the sequence of SEQ ID NO: 57 (ZF4). In some embodiments, the ZFA sequence has about 100% sequence identity to the sequence of SEQ ID NO: 58 (ZF6). In some embodiments, the ZFA sequence has about 100% sequence identity to the sequence of SEQ ID NO: 59 (ZF10). In some embodiments, the ZFA sequence has about 100% sequence identity to the sequence of SEQ ID NO: 60 (ZF11).

[0125] In some embodiments, the ZF protein domain includes multiple ZFAs having the same amino acid sequences. In some embodiments, the ZF protein domain includes multiple ZFAs whose amino acid sequences are different from one another.

[0126] In some embodiments, the ZF protein domain of the engineered Notch receptors disclosed herein includes one or more ZFAs that are independently capable of specifically binding to a target nucleic acid sequence selected from the group consisting of SEQ ID NOS: 61-71. In some embodiments, at least one ZFA is capable of specifically binding to a target nucleic acid sequence having the sequence of SEQ ID NO: 61. In some embodiments, at least one ZFA is capable of specifically binding to a target nucleic acid sequence having the sequence of SEQ ID NO: 62. In some embodiments, at least one ZFA is capable of specifically binding to a target nucleic acid sequence having the sequence of SEQ ID NO: 63. In some embodiments, at least one ZFA is capable of specifically binding to a target nucleic acid sequence having the sequence of SEQ ID NO: 64. In some embodiments, at least one ZFA is capable of specifically binding to a target nucleic acid sequence having the sequence of SEQ ID NO: 65. In some embodiments, at least one ZFA is capable of specifically binding to a target nucleic acid sequence having the sequence of SEQ ID NO: 66. In some embodiments, at least one ZFA is capable of specifically binding to a target nucleic acid sequence having the sequence of SEQ ID NO: 67. In some embodiments, at least one ZFA is capable of specifically binding to a target nucleic acid sequence having the sequence of SEQ ID NO: 68. In some embodiments, at least one ZFA is capable of specifically binding to a target nucleic acid sequence having the sequence of SEQ ID NO: 69. In some embodiments, at least one ZFA is capable of specifically binding to a target nucleic acid sequence having the sequence of SEQ ID NO: 70. In some embodiments, at least one ZFA is capable of specifically binding to a target nucleic acid sequence having the sequence of SEQ ID NO: 71.

[0127] As described herein, the zinc finger-containing transcriptional effector (ZTE) of the engineered Notch receptors disclosed herein includes a second domain through which the ZTE exerts its effect (effector domain). Exemplary effector domains suitable for the engineered Notch receptors of the disclosure include, but are not limited to, transcriptional activating domains, transcriptional repressor domains, epigenetic effector domains, and DNA modifying enzymes.

[0128] Accordingly, in some embodiments, the effector domain of the ZTE includes a transcription-activating domain (TAD). Non-limiting examples of transcription-activating domains suitable for use in the compositions and methods disclosed herein include Herpes Simplex Virus Protein 16 (HSV VP16) activation domain; an activation domain consisting of four tandem copies of VP16 (VP64); a p65 activation domain of NFκB; an Epstein-Barr virus R transactivator activation domain (Rta); a tripartite activator consisting of VP64, and Rta activation domains (VPR); and a histone acetyltransferase core domain of the human E1A-associated protein p300 (p300 HAT core activation domain). In some embodiments, the effector domain of the ZTE includes a p65 activation domain of NFκB.

[0129] In some embodiments, the ZTE of the engineered Notch receptors disclosed herein is further operably linked to an additional heterologous sequence. The additional sequence can be fused to the transactivation domain of the ZTp65 TAD. In principle, the additional sequence can be derived from any suitable endogenous proteins. Non-limiting examples of suitable sequences include those derived from heat shock factor 1 (HSF1) or the glucocorticoid receptor (GR). In some aspects, the full protein glucocorticoid receptor contains multiple transactivation domains with their own subnames. As used herein in the chimeric polypeptides provided herein, any of the transactivation domain of GR can be used. In some specific examples, the transactivation domain comprises the Glucocorticoid Receptor Tau1 (Minimal) domain, which is abbreviated to “GR1” in the present disclosure.

[0130] Thus, in some embodiments, the effector domain of the ZTE includes a fusion protein comprising p65 activation domain of NFκB and a sequence derived from HSF1. In other embodiments, the effector domain of the ZTE includes a fusion protein comprising p65 activation domain of NFκB and a sequence derived from GR1. Additional sequences suitable for the compositions and methods disclosed herein include, but are not limited to, sequences derived from the HIF1a, ATF6, ELF3, p53, ZNF473, FOXO, and Myb. Some exemplary constructs are provided herein, for example, in SEQ ID NOS: 130-133, 136, 137, 138, 139, 141, 142, 144, and 145. In some embodiments, these fusion TAD domains (e.g., the p65-HSF1 or the p65-GR1 TADs) produce more effective transcriptional activation of a gene of interest than TAD domains without the fusion of the additional sequence (e.g., the p65 TAD alone). See, for example, the results described in Example 1 and FIG. 10.

[0131] In some embodiments, the effector domain of the ZTE includes a transcription repressor domain. Non-limiting examples of transcription repressor domains suitable for use in the compositions and methods disclosed herein include a Kruppel associated box repression domain (KRAB); a Repressor Element Silencing Transcription Factor repression domain (REST); a WRPW motif of the hairy-related basic helix-loop-helix repressor proteins repression domain (WRPW); a DNA (cytosine-5)-methyltransferase 3B repression domain (DNMT3B); and an HP1 alpha chromoshadow repression domain. In some embodiments, the transcription repressor domain includes a KRAB repressor domain.

[0132] Accordingly, in some embodiments, the effector domain of the ZTE includes an epigenetic effector domain. Examples of epigenetic effector domain suitable for use in the compositions and methods disclosed herein include, but are not limited to, DNA methyltransferases DNMT (DNMT1, DNMT3), HAT1, GCN5, PCAF, MLL, SET, DOT1, SUV39H, G9a, KAT2A/B, EZH1/2, TET1/2, SIRT family protein effector domains, histone deacetylases, LSD1, and KDM family protein effector domains.

[0133] Effectors domains suitable for the compositions and methods of the disclosure can be naturally-occurring transcriptional regulators or can be engineered, designed, or modified so as to provide desired and/or improved properties, e.g., modulating transcription a eukaryotic cell. In some embodiments, the effector domain is derived from an animal protein. In some embodiments, the effector domain is derived from a mammalian protein. In some embodiments, the effector domain is derived from non-human primate protein. In some embodiments, the effector domain is derived from a human protein.

[0134] In some embodiments, the ICD of the chimeric receptors disclosed herein further includes a nuclear transport signal sequence (NLS). Nuclear localization signals (NLSs) are short peptide motifs that mediate the nuclear import of proteins by binding to their receptors, known as importins (karyopherins).

[0135] It will be understood by one having ordinary skill in the art that a transcriptional effector can be a transcriptional activator or a transcriptional repressor. In some embodiments, the transcriptional effector is a transcriptional repressor. In some embodiments, the transcriptional effector is a transcriptional activator. In some embodiments, the transcriptional effector directly regulates differentiation of the cell. In some embodiments, the transcriptional effector indirectly modulates (e.g., regulates) differentiation of the cell by modulating the expression of a second transcription factor.

[0136] Chimeric polypeptides and synZTE-containing Notch receptors of the present disclosure can be chimeric polypeptides of any length, including chimeric polypeptides that are generally between about 100 amino acids (aa) to about 1000 aa, e.g., from about 100 aa to about 200 aa, from about 150 aa to about 250 aa, from about 200 aa to about 300 aa, from about 250 aa to about 350 aa, from about 300 aa to about 400 aa, from about 350 aa to about 450 aa, from about 400 aa to about 500 aa in length. In some embodiments, the disclosed chimeric polypeptides are at least about 100, 200, 300, 400, 500, 600, 700, 750, 800, 850, 900, 950, or 1,000 aa in length. In some embodiments, the disclosed chimeric polypeptides are less than about 1,500, 1,400, 1,300, 1,200, 1,100, 1,000, 950, 900, 850, 800, 750, 700, 600, 500, 400, 350, 300, 250, or 200 aa in length. In some embodiments, the disclosed chimeric polypeptides are generally between about 400 aa to about 450 aa, from about 450 aa to about 500 aa, from about 500 aa to about 550 aa, from about 550 aa to about 600 aa, from about 600 aa to about 650 aa, from about 650 aa to about 700 aa, from about 700 aa to about 750 aa, from about 750 aa to about 800 aa, from about 800 aa to about 850 aa, from about 850 aa to about 900 aa, from about 900 aa to about 950 aa, or from about 950 aa to about 1000 aa in length. In some cases, the chimeric polypeptides of the present disclosure have a length of about 300 aa to about 400 aa. In some cases, the chimeric polypeptides of the present disclosure have a length of about 300 aa to about 350 aa. In some cases, the chimeric polypeptides of the present disclosure have a length of about 300 aa to about 325 aa. In some cases, the chimeric polypeptides of the present disclosure have a length of about 350 aa to about 400 aa. In some cases, the chimeric polypeptides of the present disclosure have a length of 750 aa to 850 aa.

[0137] Additional Domains

[0138] In some embodiments, the Notch extracellular domains located N-terminally to the TMD can further include an additional domain, for example a membrane localization signal such as a CD8A signal, a detectable marker such as a myc tag or his tag, and the like. Without being bound to any particular theory, it may be beneficial to incorporate additional domains N-terminally to the hinge domain. This is because, incorporating bulky features (such as an NRR) adjacent to the TMD would affect receptor activity, unless it is spaced far enough away. It is also contemplated that the chimeric polypeptides and synZTE-containing Notch receptors as described herein can be further engineered to include one or more additional features such as, a signal sequence, a detectable label, a tumor-specific cleavage site, a disease-specific cleavage site, or combinations thereof. For example, several proteases (such as matrix metalloproteases) are upregulated in cancers, allowing tumor-specific cleavage specificity not via a specific cleavage site but via higher levels of specific proteases. Additional information in this regard can be found in, for example, J. S. Dudani et al., Annu. Rev. Cancer Biol. (2018), 2:353-76, which is herein incorporated by reference.

[0139] In some embodiments, the synZTE-containing Notch receptor of the disclosure includes: (a) an ECD including an amino acid sequence having at least 80% sequence identity to SEQ ID NO: 10; (b) a linking polypeptide including an amino acid sequence having at least 80% sequence identity to SEQ ID NO: 11; (c) a TMD including an amino acid sequence having at least 80% sequence identity to SEQ ID NO: 31; (c) a stop-transfer-sequence domain including an amino acid sequence having at least 80% sequence identity to any one of SEQ ID NOS: 39-40; and (d) a ZTE including an amino acid sequence having at least 80% sequence identity to SEQ ID NO: 56.

[0140] In some embodiments, the synZTE-containing Notch receptor of the disclosure includes: (a) an ECD including an amino acid sequence having at least 90% sequence identity to SEQ ID NO: 10; (b) a linking polypeptide including an amino acid sequence having at least 90% sequence identity to SEQ ID NO: 11; (c) a TMD including an amino acid sequence having at least 90% sequence identity to SEQ ID NO: 31; (c) a stop-transfer-sequence domain including an amino acid sequence having at least 90% sequence identity to any one of SEQ ID NOS: 39-40; and (d) a ZTE including an amino acid sequence having at least 90% sequence identity to SEQ ID NO: 56.

[0141] In some embodiments, the synZTE-containing Notch receptor of the disclosure includes: (a) an ECD including an amino acid sequence having at least 95% sequence identity to SEQ ID NO: 10; (b) a linking polypeptide including an amino acid sequence having at least 95% sequence identity to SEQ ID NO: 11; (c) a TMD including an amino acid sequence having at least 95% sequence identity to SEQ ID NO: 31; (c) a stop-transfer-sequence domain including an amino acid sequence having at least 95% sequence identity to any one of SEQ ID NOS: 39-40; and (d) a ZTE including an amino acid sequence having at least 95% sequence identity to SEQ ID NO: 56.

[0142] In some embodiments, the synZTE-containing Notch receptor of the disclosure includes: (a) an ECD including an amino acid sequence having at least 80% sequence identity to SEQ ID NO: 10; (b) a hinge domain including an amino acid sequence having at least 80% sequence identity to SEQ ID NO: 21; (c) a TMD including an amino acid sequence having at least 80% sequence identity to SEQ ID NO: 31; (c) a stop-transfer-sequence domain including an amino acid sequence having at least 80% sequence identity to any one of SEQ ID NOS: 39-40; and (d) a ZTE including an amino acid sequence having at least 80% sequence identity to any one of SEQ ID NOS: 55-60.

[0143] In some embodiments, the synZTE-containing Notch receptor of the disclosure includes: (a) an ECD including an amino acid sequence having at least 90% sequence identity to SEQ ID NO: 10; (b) a hinge domain including an amino acid sequence having at least 90% sequence identity to SEQ ID NO: 21; (c) a TMD including an amino acid sequence having at least 90% sequence identity to SEQ ID NO: 31; (c) a stop-transfer-sequence domain including an amino acid sequence having at least 90% sequence identity to any one of SEQ ID NOS: 39-40; and (d) a ZTE including an amino acid sequence having at least 90% sequence identity to any one of SEQ ID NOS: 55-60.

[0144] In some embodiments, the synZTE-containing Notch receptor of the disclosure includes: (a) an ECD including an amino acid sequence having at least 95% sequence identity to SEQ ID NO: 10; (b) a hinge domain including an amino acid sequence having at least 95% sequence identity to SEQ ID NO: 21; (c) a TMD including an amino acid sequence having at least 95% sequence identity to SEQ ID NO: 31; (c) a stop-transfer-sequence domain including an amino acid sequence having at least 95% sequence identity to any one of SEQ ID NOS: 39-40; and (d) a ZTE including an amino acid sequence having at least 95% sequence identity to any one of SEQ ID NOS: 55-60.

[0145] In some embodiments, the synZTE-containing Notch receptor of the disclosure includes an amino acid sequence having at least about 80%, 90%, 95%, 96%, 97, 98%, 99%, or 100% sequence identity to a chimeric receptor disclosed herein. In some embodiments, provided herein are synZTE-containing Notch receptors including an amino acid sequence having at least about 80%, 90%, 95%, 96%, 97, 98%, 99%, or 100% sequence identity to any one of SEQ ID NOS: 1-9 and 113-123 identified in the Sequence Listing. In some embodiments, the chimeric polypeptide includes an amino acid sequence having at least about 80%, 90%, 95%, 96%, 97, 98%, 99%, or 100% sequence identity to SEQ ID NO: 1. In some embodiments, the synZTE-containing Notch receptor includes an amino acid sequence having at least about 80%, 90%, 95%, 96%, 97, 98%, 99%, or 100% sequence identity to SEQ ID NO: 2. In some embodiments, the synZTE-containing Notch receptor includes an amino acid sequence having at least about 80%, 90%, 95%, 96%, 97, 98%, 99%, or 100% sequence identity to SEQ ID NO: 3. In some embodiments, the synZTE-containing Notch receptor includes an amino acid sequence having at least about 80%, 90%, 95%, 96%, 97, 98%, 99%, or 100% sequence identity to SEQ ID NO: 4. In some embodiments, the synZTE-containing Notch receptor includes an amino acid sequence having at least about 80%, 90%, 95%, 96%, 97, 98%, 99%, or 100% sequence identity to SEQ ID NO: 5. In some embodiments, the synZTE-containing Notch receptor includes an amino acid sequence having at least about 80%, 90%, 95%, 96%, 97, 98%, 99%, or 100% sequence identity to SEQ ID NO: 6. In some embodiments, the synZTE-containing Notch receptor includes an amino acid sequence having at least about 80%, 90%, 95%, 96%, 97, 98%, 99%, or 100% sequence identity to SEQ ID NO: 7. In some embodiments, the synZTE-containing Notch receptor includes an amino acid sequence having at least about 80%, 90%, 95%, 96%, 97, 98%, 99%, or 100% sequence identity to SEQ ID NO: 8. In some embodiments, the synZTE-containing Notch receptor includes an amino acid sequence having at least about 80%, 90%, 95%, 96%, 97, 98%, 99%, or 100% sequence identity to SEQ ID NO: 9.

[0146] In some embodiments, the chimeric polypeptide includes an amino acid sequence having at least about 80%, 90%, 95%, 96%, 97, 98%, 99%, or 100% sequence identity to SEQ ID NO: 113. In some embodiments, the synZTE-containing Notch receptor includes an amino acid sequence having at least about 80%, 90%, 95%, 96%, 97, 98%, 99%, or 100% sequence identity to SEQ ID NO: 114. In some embodiments, the synZTE-containing Notch receptor includes an amino acid sequence having at least about 80%, 90%, 95%, 96%, 97, 98%, 99%, or 100% sequence identity to SEQ ID NO: 115. In some embodiments, the synZTE-containing Notch receptor includes an amino acid sequence having at least about 80%, 90%, 95%, 96%, 97, 98%, 99%, or 100% sequence identity to SEQ ID NO: 116. In some embodiments, the synZTE-containing Notch receptor includes an amino acid sequence having at least about 80%, 90%, 95%, 96%, 97, 98%, 99%, or 100% sequence identity to SEQ ID NO: 117. In some embodiments, the synZTE-containing Notch receptor includes an amino acid sequence having at least about 80%, 90%, 95%, 96%, 97, 98%, 99%, or 100% sequence identity to SEQ ID NO: 118. In some embodiments, the synZTE-containing Notch receptor includes an amino acid sequence having at least about 80%, 90%, 95%, 96%, 97, 98%, 99%, or 100% sequence identity to SEQ ID NO: 119. In some embodiments, the synZTE-containing Notch receptor includes an amino acid sequence having at least about 80%, 90%, 95%, 96%, 97, 98%, 99%, or 100% sequence identity to SEQ ID NO: 120. In some embodiments, the synZTE-containing Notch receptor includes an amino acid sequence having at least about 80%, 90%, 95%, 96%, 97, 98%, 99%, or 100% sequence identity to SEQ ID NO: 121. In some embodiments, the synZTE-containing Notch receptor includes an amino acid sequence having at least about 80%, 90%, 95%, 96%, 97, 98%, 99%, or 100% sequence identity to SEQ ID NO: 122. In some embodiments, the synZTE-containing Notch receptor includes an amino acid sequence having at least about 80%, 90%, 95%, 96%, 97, 98%, 99%, or 100% sequence identity to SEQ ID NO: 123. In some embodiments, the synZTE-containing Notch receptor includes an amino acid sequence having at least about 80%, 90%, 95%, 96%, 97, 98%, 99%, or 100% sequence identity to SEQ ID NO: 124. In some embodiments, the synZTE-containing Notch receptor includes an amino acid sequence having at least about 80%, 90%, 95%, 96%, 97, 98%, 99%, or 100% sequence identity to SEQ ID NO: 125. In some embodiments, the synZTE-containing Notch receptor includes an amino acid sequence having at least about 80%, 90%, 95%, 96%, 97, 98%, 99%, or 100% sequence identity to SEQ ID NO: 126. In some embodiments, the synZTE-containing Notch receptor includes an amino acid sequence having at least about 80%, 90%, 95%, 96%, 97, 98%, 99%, or 100% sequence identity to SEQ ID NO: 127. In some embodiments, the synZTE-containing Notch receptor includes an amino acid sequence having at least about 80%, 90%, 95%, 96%, 97, 98%, 99%, or 100% sequence identity to SEQ ID NO: 128. In some embodiments, the synZTE-containing Notch receptor includes an amino acid sequence having at least about 80%, 90%, 95%, 96%, 97, 98%, 99%, or 100% sequence identity to SEQ ID NO: 129. In some embodiments, the synZTE-containing Notch receptor includes an amino acid sequence having at least about 80%, 90%, 95%, 96%, 97, 98%, 99%, or 100% sequence identity to SEQ ID NO: 130. In some embodiments, the synZTE-containing Notch receptor includes an amino acid sequence having at least about 80%, 90%, 95%, 96%, 97, 98%, 99%, or 100% sequence identity to SEQ ID NO: 131. In some embodiments, the synZTE-containing Notch receptor includes an amino acid sequence having at least about 80%, 90%, 95%, 96%, 97, 98%, 99%, or 100% sequence identity to SEQ ID NO: 132. In some embodiments, the synZTE-containing Notch receptor includes an amino acid sequence having at least about 80%, 90%, 95%, 96%, 97, 98%, 99%, or 100% sequence identity to SEQ ID NO: 133. In some embodiments, the synZTE-containing Notch receptor includes an amino acid sequence having at least about 80%, 90%, 95%, 96%, 97, 98%, 99%, or 100% sequence identity to SEQ ID NO: 134. In some embodiments, the synZTE-containing Notch receptor includes an amino acid sequence having at least about 80%, 90%, 95%, 96%, 97, 98%, 99%, or 100% sequence identity to SEQ ID NO: 135. In some embodiments, the synZTE-containing Notch receptor includes an amino acid sequence having at least about 80%, 90%, 95%, 96%, 97, 98%, 99%, or 100% sequence identity to SEQ ID NO: 136. In some embodiments, the synZTE-containing Notch receptor includes an amino acid sequence having at least about 80%, 90%, 95%, 96%, 97, 98%, 99%, or 100% sequence identity to SEQ ID NO: 137. In some embodiments, the synZTE-containing Notch receptor includes an amino acid sequence having at least about 80%, 90%, 95%, 96%, 97, 98%, 99%, or 100% sequence identity to SEQ ID NO: 138. In some embodiments, the synZTE-containing Notch receptor includes an amino acid sequence having at least about 80%, 90%, 95%, 96%, 97, 98%, 99%, or 100% sequence identity to SEQ ID NO: 139. In some embodiments, the synZTE-containing Notch receptor includes an amino acid sequence having at least about 80%, 90%, 95%, 96%, 97, 98%, 99%, or 100% sequence identity to SEQ ID NO: 140. In some embodiments, the synZTE-containing Notch receptor includes an amino acid sequence having at least about 80%, 90%, 95%, 96%, 97, 98%, 99%, or 100% sequence identity to SEQ ID NO: 141. In some embodiments, the synZTE-containing Notch receptor includes an amino acid sequence having at least about 80%, 90%, 95%, 96%, 97, 98%, 99%, or 100% sequence identity to SEQ ID NO: 142. In some embodiments, the synZTE-containing Notch receptor includes an amino acid sequence having at least about 80%, 90%, 95%, 96%, 97, 98%, 99%, or 100% sequence identity to SEQ ID NO: 143. In some embodiments, the synZTE-containing Notch receptor includes an amino acid sequence having at least about 80%, 90%, 95%, 96%, 97, 98%, 99%, or 100% sequence identity to SEQ ID NO: 144. In some embodiments, the synZTE-containing Notch receptor includes an amino acid sequence having at least about 80%, 90%, 95%, 96%, 97, 98%, 99%, or 100% sequence identity to SEQ ID NO: 145.

### Nucleic Acid Molecules

[0147] In another aspect, provided herein are various nucleic acid molecules including nucleotide sequences encoding the chimeric polypeptides and synZTE-containing Notch receptors of the disclosure, including expression cassettes, and expression vectors containing these nucleic acid molecules operably linked to heterologous nucleic acid sequences such as, for example, regulatory sequences which facilitate in vivo expression of the receptor in a host cell.

[0148] Nucleic acid molecules of the present disclosure can be of any length, including for example, between about 1.5 Kb and about 50 Kb, between about 5 Kb and about 40 Kb, between about 5 Kb and about 30 Kb, between about 5 Kb and about 20 Kb, or between about 10 Kb and about 50 Kb, for example between about 15 Kb to 30 Kb, between about 20 Kb and about 50 Kb, between about 20 Kb and about 40 Kb, about 5 Kb and about 25 Kb, or about 30 Kb and about 50 Kb.

[0149] In some embodiments, provided herein is a nucleic acid molecule including a nucleotide sequence encoding a chimeric polypeptide or synZTE-containing Notch receptor including, from N-terminus to C-terminus: (a) an extracellular ligand-binding domain having a binding affinity for a selected ligand; (b) a linking polypeptide having: (i) at least about 80%, 85%, 90%, 95%, 96%, 97%, 98%, 99%, or 100% sequence identity to a Notch juxtamembrane domain (JMD) wherein a LIN-12-Notch repeat (LNR) and/or a heterodimerization domain (HD) of a Notch receptor has been deleted; (ii) at least about 80%, 85%, 90%, 95%, 96%, 97%, 98%, 99%, or 100% sequence identity to a polypeptide hinge domain; or (iii) a sequence of about 2 to about 40 amino acid residues; (c) a transmembrane domain having at least about 80%, 85%, 90%, 95%, 96%, 97%, 98%, 99%, or 100% sequence identity to the transmembrane domain of a Type 1 transmembrane receptor and including one or more ligand-inducible proteolytic cleavage sites; and (d) an intracellular domain including a zinc finger-containing transcriptional effector (ZTE), wherein binding of the selected ligand to the extracellular binding domain induces cleavage at a ligand-inducible proteolytic cleavage site within the transmembrane domain.

[0150] In some embodiments, the nucleotide sequence is incorporated into an expression cassette or an expression vector. It will be understood that an expression cassette generally includes a construct of genetic material that contains coding sequences and enough regulatory information to direct proper transcription and/or translation of the coding sequences in a recipient cell, in vivo and/or ex vivo. Generally, the expression cassette may be inserted into a vector for targeting to a desired host cell and/or into an individual. As such, in some embodiments, an expression cassette of the disclosure include a coding sequence for the chimeric polypeptide or synZTE-containing Notch receptor as disclosed herein, which is operably linked to expression control elements, such as a promoter, and optionally, any or a combination of other nucleic acid sequences that affect the transcription or translation of the coding sequence.

[0151] In some embodiments, the nucleotide sequence is incorporated into an expression vector. It will be understood by one skilled in the art that the term “vector” generally refers to a recombinant polynucleotide construct designed for transfer between host cells, and that may be used for the purpose of transformation, e.g., the introduction of heterologous DNA into a host cell. As such, in some embodiments, the vector can be a replicon, such as a plasmid, phage, or cosmid, into which another DNA segment may be inserted so as to bring about the replication of the inserted segment. In some embodiments, the expression vector can be an integrating vector.

[0152] In some embodiments, the expression vector can be a viral vector. As will be appreciated by one of skill in the art, the term “viral vector” is widely used to refer either to a nucleic acid molecule (e.g., a transfer plasmid) that includes virus-derived nucleic acid elements that generally facilitate transfer of the nucleic acid molecule or integration into the genome of a cell or to a viral particle that mediates nucleic acid transfer. Viral particles will generally include various viral components and sometimes also host cell components in addition to nucleic acid(s). The term viral vector may refer either to a virus or viral particle capable of transferring a nucleic acid into a cell or to the transferred nucleic acid itself. Viral vectors and transfer plasmids contain structural and/or functional genetic elements that are primarily derived from a virus. The term “retroviral vector” refers to a viral vector or plasmid containing structural and functional genetic elements, or portions thereof, that are primarily derived from a retrovirus. The term “lentiviral vector” refers to a viral vector or plasmid containing structural and functional genetic elements, or portions thereof, including LTRs that are primarily derived from a lentivirus, which is a genus of retrovirus.

[0153] In some embodiments, provided herein are nucleic acid molecules encoding a polypeptide with an amino acid sequence having at least about 80%, 90%, 95%, 96%, 97, 98%, 99%, or 100% sequence identity to a chimeric receptor disclosed herein. In some embodiments, provided herein are nucleic acid molecules encoding a polypeptide with an amino acid sequence having at least about 80%, 90%, 95%, 96%, 97, 98%, 99%, or 100% sequence identity to any one of SEQ ID NOS: 1-9 and 113-123 identified in the Sequence Listing. In some embodiments, the nucleic acid molecules encode a polypeptide with an amino acid sequence having at least about 80%, 90%, 95%, 96%, 97, 98%, 99%, or 100% sequence identity to SEQ ID NO: 1. In some embodiments, the nucleic acid molecules encode a polypeptide with an amino acid sequence having at least about 80%, 90%, 95%, 96%, 97, 98%, 99%, or 100% sequence identity to SEQ ID NO: 2. In some embodiments, the nucleic acid molecules encode a polypeptide with an amino acid sequence having at least about 80%, 90%, 95%, 96%, 97, 98%, 99%, or 100% sequence identity to SEQ ID NO: 3. In some embodiments, the nucleic acid molecules encode a polypeptide with an amino acid sequence having at least about 80%, 90%, 95%, 96%, 97, 98%, 99%, or 100% sequence identity to SEQ ID NO: 4. In some embodiments, the nucleic acid molecules encode a polypeptide with an amino acid sequence having at least about 80%, 90%, 95%, 96%, 97, 98%, 99%, or 100% sequence identity to SEQ ID NO: 5. In some embodiments, the nucleic acid molecules encode a polypeptide with an amino acid sequence having at least about 80%, 90%, 95%, 96%, 97, 98%, 99%, or 100% sequence identity to SEQ ID NO: 6. In some embodiments, the nucleic acid molecules encode a polypeptide with an amino acid sequence having at least about 80%, 90%, 95%, 96%, 97, 98%, 99%, or 100% sequence identity to SEQ ID NO: 7. In some embodiments, the nucleic acid molecules encode a polypeptide with an amino acid sequence having at least about 80%, 90%, 95%, 96%, 97, 98%, 99%, or 100% sequence identity to SEQ ID NO: 8. In some embodiments, the nucleic acid molecules encode a polypeptide with an amino acid sequence having at least about 80%, 90%, 95%, 96%, 97, 98%, 99%, or 100% sequence identity to SEQ ID NO: 9.

[0154] In some embodiments, the nucleic acid molecules encode a polypeptide with an amino acid sequence having at least about 80%, 90%, 95%, 96%, 97, 98%, 99%, or 100% sequence identity to SEQ ID NO: 113. In some embodiments, the nucleic acid molecules encode a polypeptide with an amino acid sequence having at least about 80%, 90%, 95%, 96%, 97, 98%, 99%, or 100% sequence identity to SEQ ID NO: 114. In some embodiments, the nucleic acid molecules encode a polypeptide with an amino acid sequence having at least about 80%, 90%, 95%, 96%, 97, 98%, 99%, or 100% sequence identity to SEQ ID NO: 115. In some embodiments, the nucleic acid molecules encode a polypeptide with an amino acid sequence having at least about 80%, 90%, 95%, 96%, 97, 98%, 99%, or 100% sequence identity to SEQ ID NO: 116. In some embodiments, the nucleic acid molecules encode a polypeptide with an amino acid sequence having at least about 80%, 90%, 95%, 96%, 97, 98%, 99%, or 100% sequence identity to SEQ ID NO: 117. In some embodiments, the nucleic acid molecules encode a polypeptide with an amino acid sequence having at least about 80%, 90%, 95%, 96%, 97, 98%, 99%, or 100% sequence identity to SEQ ID NO: 118. In some embodiments, the nucleic acid molecules encode a polypeptide with an amino acid sequence having at least about 80%, 90%, 95%, 96%, 97, 98%, 99%, or 100% sequence identity to SEQ ID NO: 119. In some embodiments, the nucleic acid molecules encode a polypeptide with an amino acid sequence having at least about 80%, 90%, 95%, 96%, 97, 98%, 99%, or 100% sequence identity to SEQ ID NO: 120. In some embodiments, the nucleic acid molecules encode a polypeptide with an amino acid sequence having at least about 80%, 90%, 95%, 96%, 97, 98%, 99%, or 100% sequence identity to SEQ ID NO: 121. In some embodiments, the nucleic acid molecules encode a polypeptide with an amino acid sequence having at least about 80%, 90%, 95%, 96%, 97, 98%, 99%, or 100% sequence identity to SEQ ID NO: 122. In some embodiments, the nucleic acid molecules encode a polypeptide with an amino acid sequence having at least about 80%, 90%, 95%, 96%, 97, 98%, 99%, or 100% sequence identity to SEQ ID NO: 123. In some embodiments, the nucleic acid molecules encode a polypeptide with an amino acid sequence having at least about 80%, 90%, 95%, 96%, 97, 98%, 99%, or 100% sequence identity to SEQ ID NO: 124. In some embodiments, the nucleic acid molecules encode a polypeptide with an amino acid sequence having at least about 80%, 90%, 95%, 96%, 97, 98%, 99%, or 100% sequence identity to SEQ ID NO: 125. In some embodiments, the nucleic acid molecules encode a polypeptide with an amino acid sequence having at least about 80%, 90%, 95%, 96%, 97, 98%, 99%, or 100% sequence identity to SEQ ID NO: 126. In some embodiments, the nucleic acid molecules encode a polypeptide with an amino acid sequence having at least about 80%, 90%, 95%, 96%, 97, 98%, 99%, or 100% sequence identity to SEQ ID NO: 127. In some embodiments, the nucleic acid molecules encode a polypeptide with an amino acid sequence having at least about 80%, 90%, 95%, 96%, 97, 98%, 99%, or 100% sequence identity to SEQ ID NO: 128. In some embodiments, the nucleic acid molecules encode a polypeptide with an amino acid sequence having at least about 80%, 90%, 95%, 96%, 97, 98%, 99%, or 100% sequence identity to SEQ ID NO: 129. In some embodiments, the nucleic acid molecules encode a polypeptide with an amino acid sequence having at least about 80%, 90%, 95%, 96%, 97, 98%, 99%, or 100% sequence identity to SEQ ID NO: 130. In some embodiments, the nucleic acid molecules encode a polypeptide with an amino acid sequence having at least about 80%, 90%, 95%, 96%, 97, 98%, 99%, or 100% sequence identity to SEQ ID NO: 131. In some embodiments, the nucleic acid molecules encode a polypeptide with an amino acid sequence having at least about 80%, 90%, 95%, 96%, 97, 98%, 99%, or 100% sequence identity to SEQ ID NO: 132. In some embodiments, the nucleic acid molecules encode a polypeptide with an amino acid sequence having at least about 80%, 90%, 95%, 96%, 97, 98%, 99%, or 100% sequence identity to SEQ ID NO: 133. In some embodiments, the nucleic acid molecules encode a polypeptide with an amino acid sequence having at least about 80%, 90%, 95%, 96%, 97, 98%, 99%, or 100% sequence identity to SEQ ID NO: 134. In some embodiments, the nucleic acid molecules encode a polypeptide with an amino acid sequence having at least about 80%, 90%, 95%, 96%, 97, 98%, 99%, or 100% sequence identity to SEQ ID NO: 135. In some embodiments, the nucleic acid molecules encode a polypeptide with an amino acid sequence having at least about 80%, 90%, 95%, 96%, 97, 98%, 99%, or 100% sequence identity to SEQ ID NO: 136. In some embodiments, the nucleic acid molecules encode a polypeptide with an amino acid sequence having at least about 80%, 90%, 95%, 96%, 97, 98%, 99%, or 100% sequence identity to SEQ ID NO: 137. In some embodiments, the nucleic acid molecules encode a polypeptide with an amino acid sequence having at least about 80%, 90%, 95%, 96%, 97, 98%, 99%, or 100% sequence identity to SEQ ID NO: 138. In some embodiments, the nucleic acid molecules encode a polypeptide with an amino acid sequence having at least about 80%, 90%, 95%, 96%, 97, 98%, 99%, or 100% sequence identity to SEQ ID NO: 139. In some embodiments, the nucleic acid molecules encode a polypeptide with an amino acid sequence having at least about 80%, 90%, 95%, 96%, 97, 98%, 99%, or 100% sequence identity to SEQ ID NO: 140. In some embodiments, the nucleic acid molecules encode a polypeptide with an amino acid sequence having at least about 80%, 90%, 95%, 96%, 97, 98%, 99%, or 100% sequence identity to SEQ ID NO: 141. In some embodiments, the nucleic acid molecules encode a polypeptide with an amino acid sequence having at least about 80%, 90%, 95%, 96%, 97, 98%, 99%, or 100% sequence identity to SEQ ID NO: 142. In some embodiments, the nucleic acid molecules encode a polypeptide with an amino acid sequence having at least about 80%, 90%, 95%, 96%, 97, 98%, 99%, or 100% sequence identity to SEQ ID NO: 143. In some embodiments, the nucleic acid molecules encode a polypeptide with an amino acid sequence having at least about 80%, 90%, 95%, 96%, 97, 98%, 99%, or 100% sequence identity to SEQ ID NO: 144. In some embodiments, the nucleic acid molecules encode a polypeptide with an amino acid sequence having at least about 80%, 90%, 95%, 96%, 97, 98%, 99%, or 100% sequence identity to SEQ ID NO: 145.

[0155] In some embodiments, the nucleic acid molecules disclosed herein further include a response element, wherein the response element includes: (a) a ZFA target sequence; (b) an engineered responsive promoter operably linked to the ZF target sequence; and (c) a polynucleotide of interest. In some embodiments, the polynucleotide of interest encodes a regulatory RNA, a regulatory protein, a therapeutic protein, or a detectable label.

[0156] Engineered responsive promoter are designed by placing instances of the targetable DNA sequences (e.g., ZF binding sites) upstream of constitutive promoters. The targetable DNA sequences are operably linked to the promoters such that the occupancy of synTFs on the targetable DNA sequences regulates the activity of the promoter in gene expression. The combination of synTFs and a targetable DNA sequence-promoter forms a unique expression system that is artificial, scalable, and regulatable, for the expression of desired genes placed within the expression systems, with no or minimal effects on the expression of endogenous genes, meaning no or minimal off-site gene regulation of endogenous genes.

[0157] In some embodiments of engineered responsive promoter described, the promoter described herein can be a full-length functional promoter or a minimal promoter having very limited or no transcription initiation therefrom absent the assistance of added transcription factors. Non-limiting examples of full-length functional promoters include CMV, UBCbc, EF1 alpha, SV40, PGK, CAG, beta actin, U6 and H1. Non-limiting examples of minimal promoters include minimal CMV, and minimal TK and any synthetically designed promoters composed of core minimal promoter elements and regulating enhancer elements (e.g., HSE, TRE, NFAT/AP-1 binding elements).

[0158] The polynucleotide of interest can be a regulatory or signaling nucleic acid, or can encode any protein that can be expressed by the engineered cell. In some embodiments, the protein is a detectable label. In some embodiments, the detectable label is a fluorescent protein or a chromogenic protein. Suitable fluorescent proteins include GFP, mCherry, mTomato, mStrawberry, and other. In some embodiments, the protein is a therapeutic protein. In some embodiments, the therapeutic protein is a chimeric antigen receptor (CAR). In some embodiments, the therapeutic protein is a therapeutic antibody. In some embodiments, the therapeutic antibody is an antibody capable of specifically binding to an immune checkpoint receptor, such as CTLA-4, PD-1, PD-L1, or others. In some embodiments, the protein is a cytokine. In some embodiments, the cytokine is IL-12 or IFNγ. In some embodiments, the polynucleotide of interest encodes a regulatory nucleic acid. In some embodiments, the regulatory nucleic acid is an RNA. In some embodiments, the regulatory RNA is an siRNA, shRNA, or miRNA.

[0159] The nucleic acid sequences encoding the chimeric receptors can be optimized for expression in the host cell of interest. For example, the G-C content of the sequence can be adjusted to average levels for a given cellular host, as calculated by reference to known genes expressed in the host cell. Methods for codon usage optimization are known in the art. Codon usages within the coding sequence of the chimeric receptor disclosed herein can be optimized to enhance expression in the host cell, such that about 1%, about 5%, about 10%, about 25%, about 50%, about 75%, or up to 100% of the codons within the coding sequence have been optimized for expression in a particular host cell.

[0160] Some embodiments disclosed herein relate to vectors or expression cassettes including a recombinant nucleic acid molecule encoding the chimeric receptors disclosed herein. The expression cassette generally contains coding sequences and sufficient regulatory information to direct proper transcription and/or translation of the coding sequences in a recipient cell, in vivo and/or ex vivo. The expression cassette may be inserted into a vector for targeting to a desired host cell and/or into an individual. An expression cassette can be inserted into a plasmid, cosmid, virus, autonomously replicating polynucleotide molecule, phage, as a linear or circular, single-stranded or double-stranded, DNA or RNA polynucleotide molecule, derived from any source, capable of genomic integration or autonomous replication, including a nucleic acid molecule where one or more nucleic acid sequences has been linked in a functionally operative manner, i.e., operably linked.

[0161] Also provided herein are vectors, plasmids, or viruses containing one or more of the nucleic acid molecules encoding any chimeric receptor or synZTE-containing Notch receptor disclosed herein. The nucleic acid molecules can be contained within a vector that is capable of directing their expression in, for example, a cell that has been transformed/transduced with the vector. Suitable vectors for use in eukaryotic and prokaryotic cells are known in the art and are commercially available, or readily prepared by a skilled artisan. See for example, Sambrook, J., & Russell, D. W. (2012). Molecular Cloning: A Laboratory Manual (4th ed.). Cold Spring Harbor, N.Y.: Cold Spring Harbor Laboratory and Sambrook, J., & Russel, D. W. (2001). Molecular Cloning: A Laboratory Manual (3rd ed.). Cold Spring Harbor, N.Y.: Cold Spring Harbor Laboratory (jointly referred to herein as “Sambrook”); Ausubel, F. M. (1987). Current Protocols in Molecular Biology. New York, N.Y.: Wiley (including supplements through 2014); Bollag, D. M. et al. (1996). Protein Methods. New York, N.Y.: Wiley-Liss; Huang, L. et al. (2005). Nonviral Vectors for Gene Therapy. San Diego: Academic Press; Kaplitt, M. G. et al. (1995). Viral Vectors: Gene Therapy and Neuroscience Applications. San Diego, Calif.: Academic Press; Lefkovits, I. (1997). The Immunology Methods Manual: The Comprehensive Sourcebook of Techniques. San Diego, Calif.: Academic Press; Doyle, A. et al. (1998). Cell and Tissue Culture: Laboratory Procedures in Biotechnology. New York, N.Y.: Wiley; Mullis, K. B., Ferré, F. & Gibbs, R. (1994). PCR: The Polymerase Chain Reaction. Boston: Birkhauser Publisher; Greenfield, E. A. (2014). Antibodies: A Laboratory Manual (2nd ed.). New York, N.Y.: Cold Spring Harbor Laboratory Press; Beaucage, S. L. et al. (2000). Current Protocols in Nucleic Acid Chemistry. New York, N.Y.: Wiley, (including supplements through 2014); and Makrides, S. C. (2003). Gene Transfer and Expression in Mammalian Cells. Amsterdam, NL: Elsevier Sciences B.V., the disclosures of which are incorporated herein by reference).

[0162] DNA vectors can be introduced into eukaryotic cells via conventional transformation or transfection techniques. Suitable methods for transforming or transfecting cells can be found in Sambrook et al. (2012, supra) and other standard molecular biology laboratory manuals, such as, calcium phosphate transfection, DEAE-dextran mediated transfection, transfection, microinjection, cationic lipid-mediated transfection, electroporation, transduction, scrape loading, ballistic introduction, nucleoporation, hydrodynamic shock, and infection.

[0163] Viral vectors that can be used in the disclosure include, for example, retrovirus vectors, adenovirus vectors, and adeno-associated virus vectors, lentivirus vectors, herpes virus, simian virus 40 (SV40), and bovine papilloma virus vectors (see, for example, Gluzman (Ed.), Eukaryotic Viral Vectors, CSH Laboratory Press, Cold Spring Harbor, N.Y.). For example, a chimeric receptor as disclosed herein can be produced in a eukaryotic cell, such as a mammalian cell (e.g., COS cells, NIH 3T3 cells, or HeLa cells). These cells are available from many sources, including the American Type Culture Collection (Manassas, Va.). In selecting an expression system, care should be taken to ensure that the components are compatible with one another. Artisans or ordinary skill are able to make such a determination. Furthermore, if guidance is required in selecting an expression system, skilled artisans may consult P. Jones, “Vectors: Cloning Applications”, John Wiley and Sons, New York, N.Y., 2009).

[0164] The nucleic acid molecules provided can contain naturally occurring sequences, or sequences that differ from those that occur naturally, but, due to the degeneracy of the genetic code, encode the same polypeptide, e.g., antibody. These nucleic acid molecules can consist of RNA or DNA (for example, genomic DNA, cDNA, or synthetic DNA, such as that produced by phosphoramidite-based synthesis), or combinations or modifications of the nucleotides within these types of nucleic acids. In addition, the nucleic acid molecules can be double-stranded or single-stranded (e.g., either a sense or an antisense strand).

[0165] The nucleic acid molecules are not limited to sequences that encode polypeptides (e.g., antibodies); some or all of the non-coding sequences that lie upstream or downstream from a coding sequence (e.g., the coding sequence of a chimeric receptor) can also be included. Those of ordinary skill in the art of molecular biology are familiar with routine procedures for isolating nucleic acid molecules. They can, for example, be generated by treatment of genomic DNA with restriction endonucleases, or by performance of the polymerase chain reaction (PCR). In the event the nucleic acid molecule is a ribonucleic acid (RNA), molecules can be produced, for example, by in vitro transcription.

### Recombinant Cells and Cell Cultures

[0166] The nucleic acid of the present disclosure can be introduced into a host cell, such as, for example, a human T lymphocyte, to produce a recombinant cell containing the nucleic acid molecule. Introduction of the nucleic acid molecules of the disclosure into cells can be achieved by methods known to those skilled in the art such as, for example, viral infection, transfection, conjugation, protoplast fusion, lipofection, electroporation, nucleofection, calcium phosphate precipitation, polyethyleneimine (PEI)-mediated transfection, DEAE-dextran mediated transfection, liposome-mediated transfection, particle gun technology, direct micro-injection, nanoparticle-mediated nucleic acid delivery, and the like.

[0167] Accordingly, in some embodiments, the nucleic acid molecules can be delivered by viral or non-viral delivery vehicles known in the art. For example, the nucleic acid molecule can be stably integrated in the host genome, or can be episomally replicating, or present in the recombinant host cell as a mini-circle expression vector for transient expression. Accordingly, in some embodiments, the nucleic acid molecule is maintained and replicated in the recombinant host cell as an episomal unit. In some embodiments, the nucleic acid molecule is stably integrated into the genome of the recombinant cell. Stable integration can be achieved using classical random genomic recombination techniques or with more precise techniques such as guide RNA-directed CRISPR/Cas genome editing, or DNA-guided endonuclease genome editing with NgAgo (Natronobacterium gregoryi Argonaute), or TALENs genome editing (transcription activator-like effector nucleases). In some embodiments, the nucleic acid molecule is present in the recombinant host cell as a mini-circle expression vector for transient expression.

[0168] The nucleic acid molecules can be encapsulated in a viral capsid or a lipid nanoparticle, or can be delivered by viral or non-viral delivery means and methods known in the art, such as electroporation. For example, introduction of nucleic acids into cells may be achieved by viral transduction. In a non-limiting example, adeno-associated virus (AAV) is engineered to deliver nucleic acids to target cells via viral transduction. Several AAV serotypes have been described, and all of the known serotypes can infect cells from multiple diverse tissue types. AAV is capable of transducing a wide range of species and tissues in vivo with no evidence of toxicity, and it generates relatively mild innate and adaptive immune responses.

[0169] Lentiviral-derived vector systems are also useful for nucleic acid delivery and gene therapy via viral transduction. Lentiviral vectors offer several attractive properties as gene-delivery vehicles, including: (i) sustained gene delivery through stable vector integration into host genome; (ii) the capability of infecting both dividing and non-dividing cells; (iii) broad tissue tropisms, including important gene- and cell-therapy-target cell types; (iv) no expression of viral proteins after vector transduction; (v) the ability to deliver complex genetic elements, such as polycistronic or intron-containing sequences; (vi) a potentially safer integration site profile; and (vii) a relatively easy system for vector manipulation and production.

[0170] In some embodiments, host cells can be genetically engineered (e.g., transduced or transformed or transfected) with, for example, a vector construct of the present application that can be, for example, a viral vector or a vector for homologous recombination that includes nucleic acid sequences homologous to a portion of the genome of the host cell, or can be an expression vector for the expression of the polypeptides of interest. Host cells can be either untransformed cells or cells that have already been transfected with at least one nucleic acid molecule.

[0171] In some embodiments, the recombinant cell is a prokaryotic cell or a eukaryotic cell. In some embodiments, the cell is in vivo. In some embodiments, the cell is ex vivo. In some embodiments, the cell is in vitro. In some embodiments, the recombinant cell is a eukaryotic cell. In some embodiments, the recombinant cell is an animal cell. In some embodiments, the animal cell is a mammalian cell. In some embodiments, the animal cell is a human cell. In some embodiments, the cell is a non-human primate cell. In some embodiments, the mammalian cell is an immune cell, a neuron, an epithelial cell, and endothelial cell, or a stem cell. In some embodiments, the recombinant cell is an immune system cell, e.g., a lymphocyte (e.g., a T cell or NK cell), or a dendritic cell. In some embodiments, the immune cell is a B cell, a monocyte, a natural killer (NK) cell, a basophil, an eosinophil, a neutrophil, a dendritic cell, a macrophage, a regulatory T cell, a helper T cell (T_{H}), a cytotoxic T cell (T_{CTL}), or other T cell. In some embodiments, the immune system cell is a T lymphocyte.

[0172] In some embodiments, the cell is a stem cell. In some embodiments, the cell is a hematopoietic stem cell. In some embodiments of the cell, the cell is a lymphocyte. In some embodiments, the cell is a precursor T cell or a T regulatory (Treg) cell. In some embodiments, the cell is a CD34+, CD8+, or a CD4+ cell. In some embodiments, the cell is a CD8+T cytotoxic lymphocyte cell selected from the group consisting of naïve CD8+ T cells, central memory CD8+ T cells, effector memory CD8+ T cells, and bulk CD8+ T cells. In some embodiments of the cell, the cell is a CD4+T helper lymphocyte cell selected from the group consisting of naïve CD4+ T cells, central memory CD4+ T cells, effector memory CD4+ T cells, and bulk CD4+ T cells. In some embodiments, the cell can be obtained by leukapheresis performed on a sample obtained from a subject. In some embodiments, the subject is a human subject. In some embodiments, the human subject is a patient.

[0173] In some embodiments, the recombinant cell further includes the recombinant cell further includes an engineered response element including i) a ZFA target sequence to which a ZFA of the ZTE of the chimeric polypeptide specifically binds, ii) a promoter sequence, wherein the nucleic acid target sequence is operably linked to the 5′ end of the promoter sequence, and iii) a polynucleotide of interest operably linked to the promoter sequence, wherein binding of the ZTE to the ZFA target sequence modulates transcription initiation of a polynucleotide of interest.

[0174] In some embodiments, the ZFA target sequence of the engineered response element includes a sequence that is orthogonal to the recombinant cell genome. In some embodiments, the ZFA target sequence includes a nucleotide sequence selected from the group consisting of SEQ ID NOS: 61-71.

[0175] In some embodiments, the engineered response element is present in a nucleic acid vector, plasmid, DNA minicircle, minichromosome, or host chromosome. In some embodiments, the engineered response element is incorporated into the same nucleic acid molecule that encodes a chimeric polypeptide or synZTE-containing Notch receptor of the disclosure. In some embodiments, the engineered response element is incorporated into a second expression vector that is separate from the nucleic acid molecule encoding the chimeric polypeptide or synZTE-containing Notch receptor of the disclosure. In some embodiments, the polynucleotide of interest encodes a protein, regulatory RNA, or an antisense oligonucleotide. In some embodiments, the protein is heterologous to the recombinant cell. A heterologous protein is one that is not normally found in the cell, e.g., not normally produced by the cell. Exemplary types of proteins suitable for use with the compositions and methods disclosed herein include cytokines, cytotoxins, chemokines, immunomodulators, pro-apoptotic factors, anti-apoptotic factors, hormones, immune cell receptors, differentiation factors, dedifferentiation factors, or reporters. In some embodiments, the immune cell receptor is a T-cell receptor (TCR). In some embodiments, the immune cell receptor is a chimeric antigen receptor (CAR).

[0176] In another aspect, some embodiments of the disclosure relate to methods for making a recombinant cell, including (a) providing a cell capable of protein expression and (b) contacting the provided cell with a recombinant nucleic acid of the disclosure. In some embodiments, the method for making a recombinant cell further includes (c) transducing the cell with a recombinant nucleic acid that encodes a response element, wherein the response element includes: (i) a ZFA target sequence; (ii) an engineered responsive promoter operably linked to the ZF target sequence; and (iii) a polynucleotide of interest.

[0177] In another aspect, provided herein are cell cultures including at least one recombinant cell as disclosed herein, and a culture medium. Generally, the culture medium can be any suitable culture medium for culturing the cells described herein. Techniques for transforming a wide variety of the above-mentioned host cells and species are known in the art and described in the technical and scientific literature. Accordingly, cell cultures including at least one recombinant cell as disclosed herein are also within the scope of this application. Methods and systems suitable for generating and maintaining cell cultures are known in the art.

### Pharmaceutical Compositions

[0178] In some embodiments, the chimeric polypeptides, synZTE-containing Notch receptors, nucleic acids, and recombinant cells of the disclosure can be incorporated into compositions, including pharmaceutical compositions. Such compositions generally include one or more of the nucleic acids of the disclosure, and/or recombinant cells of the disclosure, and a pharmaceutically acceptable excipient, e.g., carrier.

[0179] In some embodiments, the composition includes a recombinant nucleic acid as disclosed herein and a pharmaceutically acceptable excipient. In some embodiments, the recombinant nucleic acid is encapsulated in a viral capsid or a lipid nanoparticle.

[0180] Pharmaceutical compositions suitable for injectable use include sterile aqueous solutions or dispersions and sterile powders for the extemporaneous preparation of sterile injectable solutions or dispersion. For intravenous administration, suitable carriers include physiological saline, bacteriostatic water, Cremophor EL™. (BASF, Parsippany, N.J.), or phosphate buffered saline (PBS). In all cases, the composition should be sterile and should be fluid to the extent that easy syringability exists. It can be stable under the conditions of manufacture and storage, and can be preserved against the contaminating action of microorganisms such as bacteria and fungi. The carrier can be a solvent or dispersion medium containing, for example, water, ethanol, polyol (for example, glycerol, propylene glycol, and liquid polyethylene glycol, and the like), and suitable mixtures thereof. The proper fluidity can be maintained, for example, by the use of a coating such as lecithin, by the maintenance of the required particle size in the case of dispersion and by the use of surfactants, e.g., sodium dodecyl sulfate. Prevention of the action of microorganisms can be achieved by various antibacterial and antifungal agents, for example, parabens, chlorobutanol, phenol, ascorbic acid, thimerosal, and the like. In many cases, it will be generally to include isotonic agents, for example, sugars, polyalcohols such as mannitol, sorbitol, and/or sodium chloride in the composition. Prolonged absorption of the injectable compositions can be brought about by including in the composition an agent which delays absorption, for example, aluminum monostearate and gelatin.

[0181] Sterile injectable solutions can be prepared by incorporating the active compound in the required amount in an appropriate solvent with one or a combination of ingredients enumerated above, as required, followed by filtered sterilization. Generally, dispersions are prepared by incorporating the active compound into a sterile vehicle, which contains a basic dispersion medium and the required other ingredients from those enumerated above.

### Methods of the Disclosure

[0182] Administration of any one of the therapeutic compositions described herein, e.g., nucleic acids, recombinant cells, and pharmaceutical compositions, can be used to treat subjects for relevant health conditions or diseases, such as cancers and chronic infections. In some embodiments, the nucleic acids, recombinant cells, and pharmaceutical compositions described herein can be incorporated into therapeutic agents for use in methods of treating an individual who has, who is suspected of having, or who may be at high risk for developing one or more autoimmune disorders or diseases associated with checkpoint inhibition. Exemplary autoimmune disorders and diseases can include, without limitation, celiac disease, type 1 diabetes, Graves' disease, inflammatory bowel disease, multiple sclerosis, psoriasis, rheumatoid arthritis, and systemic lupus erythematosus.

[0183] Accordingly, in one aspect, some embodiments of the disclosure relate to methods for modulating (e.g., inhibiting) an activity of a target cell in an individual, the methods include administering to the individual a first therapy including one or more of nucleic acids, recombinant cells, and pharmaceutical compositions as disclosed herein, wherein the first therapy modulates (e.g., inhibits) an activity of the target cell. For example, the target cell may be inhibited if its proliferation is reduced, if its pathologic or pathogenic behavior is reduced, if it is destroyed or killed, etc. Inhibition includes a reduction of the measured pathologic or pathogenic behavior of at least about 10%, about 15%, about 20%, about 25%, about 30%, about 35%, about 40%, about 45%, about 50%, about 55%, about 60%, about 65%, about 70%, about 75%, about 80%, about 85%, about 90%, or about 95%. In some embodiments, the methods include administering to the individual an effective number of the recombinant cells disclosed herein, wherein the recombinant cells inhibit an activity of the target cells in the individual. Generally, the target cells of the disclosed methods can be any cell type in an individual and can be, for example an acute myeloma leukemia cell, an anaplastic lymphoma cell, an astrocytoma cell, a B-cell cancer cell, a breast cancer cell, a colon cancer cell, an ependymoma cell, an esophageal cancer cell, a glioblastoma cell, a glioma cell, a leiomyosarcoma cell, a liposarcoma cell, a liver cancer cell, a lung cancer cell, a mantle cell lymphoma cell, a melanoma cell, a neuroblastoma cell, a non-small cell lung cancer cell, an oligodendroglioma cell, an ovarian cancer cell, a pancreatic cancer cell, a peripheral T-cell lymphoma cell, a renal cancer cell, a sarcoma cell, a stomach cancer cell, a carcinoma cell, a mesothelioma cell, or a sarcoma cell. In some embodiments, the target cell is a pathogenic cell. In some embodiments, the target cell is a cancer cell. In some embodiments, the modulation of the activity the target cell results in the death of the target cell.

[0184] In another aspect, some embodiments of the disclosure relate to methods for the treatment of a health condition (e.g., disease) in an individual in need thereof, the methods include administering to the individual a first therapy including one or more of the recombinant cells including a chimeric polypeptide or synZTE-containing Notch receptor as disclosed herein, and/or pharmaceutical compositions as disclosed herein, wherein the first therapy treats the disease in the individual. In some embodiments, the methods include administering to the individual a first therapy including an effective number of the recombinant cells as disclosed herein, wherein the recombinant cells treat the health condition.

[0185] In another aspect, some embodiments of the disclosure relate to methods for assisting in the treatment of a health condition (e.g., disease) in an individual in need thereof, the methods including administering to the individual a first therapy including one or more of chimeric polypeptides, synZTE-containing Notch receptors, nucleic acids, recombinant cells, and pharmaceutical compositions as disclosed herein, and a second therapy, wherein the first and second therapies together treat the health condition in the individual. In some embodiments, the methods include administering to the individual a first therapy including an effective number of the recombinant cells as disclosed herein, wherein the recombinant cells treat the health condition.

### Administration of Recombinant Cells to an Individual

[0186] In some embodiments, the methods of the disclosure involve administering an effective amount or number of the recombinants cells of the disclosure to an individual in need of such treatment. This administering step can be accomplished using any method of implantation delivery in the art. For example, the recombinant cells can be infused directly in the individual's bloodstream or otherwise administered to the individual.

[0187] In some embodiments, the methods disclosed herein include administering, which term is used interchangeably with the terms “introducing,” implanting,” and “transplanting,” recombinant cells into an individual, by a method or route that results in at least partial localization of the introduced cells at a desired site such that a desired effect(s) is/are produced. The recombinant cells or their differentiated progeny can be administered by any appropriate route that results in delivery to a desired location in the individual where at least a portion of the administered cells or components of the cells remain viable. The period of viability of the cells after administration to an individual can be as short as a few hours, e.g., twenty-four hours, to a few days, to as long as several years, or even the lifetime of the individual, i.e., long-term engraftment.

[0188] When provided prophylactically, the recombinant cells described herein can be administered to an individual in advance of any symptom of a disease or condition to be treated. Accordingly, in some embodiments the prophylactic administration of a recombinant cell population prevents the occurrence of symptoms of the disease or condition.

[0189] When provided therapeutically in some embodiments, recombinant cells are provided at (or after) the onset of a symptom or indication of a disease or condition, e.g., upon the onset of disease or condition.

[0190] For use in the various embodiments described herein, an effective amount of recombinant cells as disclosed herein, can be at least 10² cells, at least 5×10² cells, at least 10³ cells, at least 5×10³ cells, at least 10⁴ cells, at least 5×10⁴ cells, at least 10⁵ cells, at least 2×10⁵ cells, at least 3×10⁵ cells, at least 4×10⁵ cells, at least 5×10⁵ cells, at least 6×10⁵ cells, at least 7×10⁵ cells, at least 8×10⁵ cells, at least 9×10⁵ cells, at least 1×10⁶ cells, at least 2×10⁶ cells, at least 3×10⁶ cells, at least 4×10⁶ cells, at least 5×10⁶ cells, at least 6×10⁶ cells, at least 7×10⁶ cells, at least 8×10⁶ cells, at least 9×10⁶ cells, or multiples thereof. The recombinant cells can be derived from one or more donors or can be obtained from an autologous source. In some embodiments, the recombinant cells are expanded in culture prior to administration to an individual in need thereof.

[0191] In some embodiments, the delivery of a recombinant cell composition (e.g., a composition including a plurality of recombinant cells according to any of the cells described herein) into an individual by a method or route results in at least partial localization of the cell composition at a desired site. A composition including recombinant cells can be administered by any appropriate route that results in effective treatment in the individual, e.g., administration results in delivery to a desired location in the individual where at least a portion of the composition delivered, e.g., at least 1×10⁴ cells, is delivered to the desired site for a period of time. Modes of administration include injection, infusion, instillation. “Injection” includes, without limitation, intravenous, intramuscular, intra-arterial, intrathecal, intraventricular, intracapsular, intraorbital, intracardiac, intradermal, intraperitoneal, transtracheal, subcutaneous, subcuticular, intraarticular, subcapsular, subarachnoid, intraspinal, intracerebrospinal, and intrasternal injection and infusion. In some embodiments, the route is intravenous. For the delivery of cells, delivery by injection or infusion is a standard mode of administration.

[0192] In some embodiments, the recombinant cells are administered systemically, e.g., via infusion or injection. For example, a population of recombinant cells are administered other than directly into a target site, tissue, or organ, such that it enters, the individual's circulatory system and, thus, is subject to metabolism and other similar biological processes.

[0193] The efficacy of a treatment including any of the compositions provided herein for the treatment of a disease or condition can be determined by a skilled clinician. However, one skilled in the art will appreciate that a treatment is considered effective if any one or all of the signs or symptoms or markers of disease are improved or ameliorated. Efficacy can also be measured by failure of an individual to worsen as assessed by decreased hospitalization or need for medical interventions (e.g., progression of the disease is halted or at least slowed). Methods of measuring these indicators are known to those of skill in the art and/or described herein. Treatment includes any treatment of a disease in an individual or an animal (some non-limiting examples include a human, or a mammal) and includes: (1) inhibiting the disease, e.g., arresting, or slowing the progression of symptoms; or (2) relieving the disease, e.g., causing regression of symptoms; and (3) preventing or reducing the likelihood of the development of symptoms.

[0194] Measurement of the degree of efficacy is based on parameters selected with regard to the disease being treated and the symptoms experienced. In general, a parameter is selected that is known or accepted as correlating with the degree or severity of the disease, such as a parameter accepted or used in the medical community. For example, in the treatment of a solid cancer, suitable parameters can include reduction in the number and/or size of metastases, number of months of progression-free survival, overall survival, stage or grade of the disease, the rate of disease progression, the reduction in diagnostic biomarkers (for example without limitation, a reduction in circulating tumor DNA or RNA, a reduction in circulating cell-free tumor DNA or RNA, and the like), and combinations thereof. It will be understood that the effective dose and the degree of efficacy will generally be determined with relation to a single subject and/or a group or population of subjects. Therapeutic methods of the disclosure reduce symptoms and/or disease severity and/or disease biomarkers by at least about 1, 2, 3, 4, 5, 10, 15, 20, 25, 30, 35, 40, 45, 50, 55, 60, 65, 70, 75, 80, 85, 90, 95, 96, 97, 98, 99, or 100%.

[0195] As discussed above, a therapeutically effective amount includes an amount of a therapeutic composition that is sufficient to promote a particular beneficial effect when administered to an individual, such as one who has, is suspected of having, or is at risk for a disease. In some embodiments, an effective amount includes an amount sufficient to prevent or delay the development of a symptom of the disease, alter the course of a symptom of the disease (for example but not limited to, slow the progression of a symptom of the disease), or reverse a symptom of the disease. It is understood that for any given case, an appropriate effective amount can be determined by one of ordinary skill in the art using routine experimentation.

[0196] In some embodiments of the disclosed methods, the individual is a mammal. In some embodiments, the mammal is a human. In some embodiments, the individual has or is suspected of having a disease associated with inhibition of cell signaling mediated by a cell surface ligand or antigen. The diseases suitable for being treated by the compositions and methods of the disclosure include, but are not limited to, cancers, autoimmune diseases, inflammatory diseases, and infectious diseases. In some embodiments, the disease is a cancer or a chronic infection.

### Additional Therapies

[0197] As discussed above, the recombinant cells, and pharmaceutical compositions described herein can be administered in combination with one or more additional therapeutic agents such as, for example, chemotherapeutics or anti-cancer agents or anti-cancer therapies. Administration “in combination with” one or more additional therapeutic agents includes simultaneous (concurrent) and consecutive administration in any order. In some embodiments, the one or more additional therapeutic agents, chemotherapeutics, anti-cancer agents, or anti-cancer therapies is selected from the group consisting of chemotherapy, radiotherapy, immunotherapy, hormonal therapy, toxin therapy, and surgery. “Chemotherapy” and “anti-cancer agent” are used interchangeably herein. Various classes of anti-cancer agents can be used. Non-limiting examples include: alkylating agents, antimetabolites, anthracyclines, plant alkaloids, topoisomerase inhibitors, podophyllotoxin, antibodies (e.g., monoclonal or polyclonal), tyrosine kinase inhibitors (e.g., imatinib mesylate (Gleevec® or Glivec®)), hormone treatments, soluble receptors and other antineoplastics.

### Methods for Modulating an Activity of a Cell

[0198] In another aspect, provided herein are various methods for modulating an activity of a cell. The methods include the steps of: (a) providing an effective number of any of the recombinant cells provided herein, and (b) contacting it with a selected ligand, wherein binding of the selected ligand to the extracellular ligand-binding domain results in cleavage of a ligand-inducible proteolytic cleavage site and release of the intracellular domain (ICD) of the chimeric Notch receptor, wherein the release of the ICD results in modulation of an activity of the recombinant cell. One skilled in the art upon reading the present disclosure will appreciate that the disclosed methods can be carried out in vivo, ex vivo, or in vitro. Accordingly, in some embodiments, the contacting of the recombinant cells with the selected ligand is carried out in vivo. In some embodiments, the contacting of the recombinant cells with the selected ligand is carried out ex vivo. In some embodiments, the contacting of the recombinant cells with the selected ligand is carried out in intro. In some embodiments, the release of the ICD results in binding of the ZTE of the released intracellular domain to a ZFA target sequence, which results in modulation of the expression initiation of a polynucleotide of interest, which results in modulation of an activity of the recombinant cell.

[0199] Non-limiting exemplary cellular activities that can be modulated using the methods provide herein include, but are not limited to, gene expression, proliferation, apoptosis, non-apoptotic death, differentiation, dedifferentiation, migration, secretion of a gene product, cellular adhesion, and cytolytic activity.

[0200] In some embodiments, the released ZTE modulates expression of a gene product of the cell. In some embodiments, the released ZTE modulates expression of a heterologous gene product in the cell. A heterologous gene product is one that is not normally found in the native cell, e.g., not normally produced by the cell. For example, the cell can be genetically modified with a nucleic acid including a nucleotide sequence encoding the heterologous gene product.

[0201] In some embodiments, the gene product is a secreted gene product. In some embodiments, the gene product is a cell surface gene product. In some cases, the gene product is an intracellular gene product. In some embodiments, the released transcriptional regulator simultaneously modulates expression of two or more gene products in the cell.

[0202] In some embodiments, the gene product in the cell is selected from the group consisting of a chemokine, a chemokine receptor, a chimeric antigen receptor, a cytokine, a cytokine receptor, a differentiation factor, a growth factor, a growth factor receptor, a hormone, a metabolic enzyme, a pathogen-derived protein, a proliferation inducer, a receptor, an RNA guided nuclease, a site-specific nuclease, a T-cell receptor (TCR), a chimeric antigen receptor (CAR), a toxin, a toxin-derived protein, a transcriptional regulator, a transcriptional activator, a transcriptional repressor, a translation regulator, a translational activator, a translational repressor, an activating immuno-receptor, an antibody, an apoptosis inhibitor, an apoptosis inducer, an engineered T cell receptor, an immuno-activator, an immuno-inhibitor, an immune cell receptor, and an inhibiting immuno-receptor. In some embodiments, the immune cell receptor is a T-cell receptor (TCR). In some embodiments, the immune cell receptor is a chimeric antigen receptor (CAR).

[0203] In some embodiments, the released transcriptional regulator modulates differentiation of the cell. In some embodiments, the cell is an immune cell, a stem cell, a progenitor cell, or a precursor cell.

[0204] The chimeric receptors and synZTE-containing Notch receptors of the present disclosure provide a higher degree of expression than an existing first-generation SynNotch receptor, when using identical binding domains and ICDs. Depending on the ligand/binding domain pair and their affinity, the chimeric polypeptides and synZTE-containing Notch receptors of the disclosure can provide expression enhancement of about 10%, about 15%, about 20%, about 25%, about 30%, about 35%, about 40%, about 45%, or about 50% higher than a corresponding first-generation SynNotch receptor.

[0205] Additionally, the chimeric receptors and synZTE-containing Notch receptors of the disclosure can provide transcriptional regulation that responds to the degree of T cell activation, independent of ligand binding. For example, when expressed in a T cell, some receptors of the disclosure provide a stronger ligand-induced signal when the T-cell is activated as compared to the ligand-induced signal when the T-cell is not activated. This permits additional flexibility in use, for example in cases where it is desired to enhance or suppress a T cell response when activated despite the absence of the chimeric receptor ligand.

### Kits

[0206] Also provided herein are various kits for the practice of a method described herein. A kit can include one or more of the chimeric polypeptides, synZTE-containing Notch receptors, recombinant nucleic acids, recombinant cells, or pharmaceutical compositions as provided and described herein. For example, provided herein, in some embodiments, are kits that include one or more of: a chimeric polypeptide as described herein, a synZTE-containing Notch receptor as described herein, a recombinant nucleic acids as described herein, a recombinant cell as described herein, or a pharmaceutical composition as described herein.

[0207] In other examples, provided herein are kits that include: (a) a chimeric polypeptide of the disclosure; (b) a recombinant nucleic acid of the disclosure; and (c) an engineered response element including: (i) a ZFA target sequence; (ii) an engineered responsive promoter operably linked to the ZFA target sequence; and (iii) a polynucleotide of interest; wherein binding of the ZTE to the nucleic acid target sequence modulates transcription initiation of the polynucleotide of interest.

[0208] In some embodiments, the kits of the disclosure further include one or more syringes (including pre-filled syringes) and/or catheters (including pre-filled syringes) used to administer one any of the recombinant nucleic acids, recombinant cells, or pharmaceutical compositions to an individual. In some embodiments, a kit can have one or more additional therapeutic agents that can be administered simultaneously or sequentially with the other kit components for a desired purpose, e.g., for modulating an activity of a cell, inhibiting a target cancer cell, or treating a disease in an individual in need thereof.

[0209] Any of the above-described kits can further include one or more additional reagents, where such additional reagents can be selected from: dilution buffers; reconstitution solutions, wash buffers, control reagents, control expression vectors, negative control polypeptides, positive control polypeptides, reagents for in vitro production of the chimeric receptor polypeptides.

[0210] In some embodiments, the components of a kit can be in separate containers. In some other embodiments, the components of a kit can be combined in a single container.

[0211] In some embodiments, a kit can further include instructions for using the components of the kit to practice the methods disclosed herein. The instructions for practicing the methods are generally recorded on a suitable recording medium. For example, the instructions can be printed on a substrate, such as paper or plastic, etc. The instructions can be present in the kit as a package insert, in the labeling of the container of the kit or components thereof (i.e., associated with the packaging or sub-packaging), etc. The instructions can be present as an electronic storage data file present on a suitable computer readable storage medium, e.g. CD-ROM, diskette, flash drive, etc. In some instances, the actual instructions are not present in the kit, but means for obtaining the instructions from a remote source (e.g., via the internet), can be provided. An example of this embodiment is a kit that includes a web address where the instructions can be viewed and/or from which the instructions can be downloaded. As with the instructions, this means for obtaining the instructions can be recorded on a suitable substrate. No admission is made that any reference cited herein constitutes prior art. The discussion of the references states what their authors assert, and the inventors reserve the right to challenge the accuracy and pertinence of the cited documents. It will be clearly understood that, although a number of information sources, including scientific journal articles, patent documents, and textbooks, are referred to herein; this reference does not constitute an admission that any of these documents forms part of the common general knowledge in the art.

[0212] The discussion of the general methods given herein is intended for illustrative purposes only. Other alternative methods and alternatives will be apparent to those of skill in the art upon review of this disclosure, and are to be included within the spirit and purview of this application.

[0213] Throughout this specification, various patents, patent applications and other types of publications (e.g., journal articles, electronic database entries, etc.) are referenced. The disclosure of all patents, patent applications, and other publications cited herein are hereby incorporated by reference in their entirety for all purpose.

### EXAMPLES

[0214] The practice of the present disclosure will employ, unless otherwise indicated, conventional techniques of molecular biology, microbiology, cell biology, biochemistry, nucleic acid chemistry, and immunology, which are well known to those skilled in the art. Such techniques are explained fully in the literature cited above.

[0215] Additional embodiments are disclosed in further detail in the following examples, which are provided by way of illustration and are not in any way intended to limit the scope of this disclosure or the claims.

### Example 1

### Design and Construction of Chimeric Receptor and Response Element Constructs

[0216] This Example describes the design and construction of a family of chimeric Notch receptors with zinc finger-containing transcriptional effector. Detailed information for various exemplary receptors of the disclosure can be found in Tables 1 and 2 below.

TABLE 1
This table provides a brief description for each of the chimeric Notch receptors,
their corresponding components, as well as corresponding sequence identifiers
as set forth in the Sequence Listing. ECD: extracellular domain; N-JMD: N-terminal
juxtamembrane domain; TMD: transmembrane domain; STS: stop-transfer-sequence;
TF: zinc finger-containing transcriptional effector (synZTE).

| | Receptor | | | | | | Full |
|---|---|---|---|---|---|---|---|
| Construct ID | Description | ECD | N-JMD | TMD | STS | TF | sequence |
| pRay050Z3 | pRay050 with ZF3 | SEQ ID | SEQ ID | SEQ ID | SEQ ID | SEQ ID | SEQ ID |
| | replacing G4VP64 | NO: 10 | NO: 11 | NO: 31 | NO: 39 | NO: 56 | NO: 1 |
| pIZ621Z3 | “miniNotch1” with | SEQ ID | SEQ ID | SEQ ID | SEQ ID | SEQ ID | SEQ ID |
| | Notch2 STS and ZF3 | NO: 10 | NO: 11 | NO: 31 | NO: 40 | NO: 56 | NO: 2 |
| | replacing G4VP64 | | | | | | |
| pIZ343Z3 | truncated CD8 Hinge | SEQ ID | SEQ ID | SEQ ID | SEQ ID | SEQ ID | SEQ ID |
| | receptor with Notch1 | NO: 10 | NO: 21 | NO: 31 | NO: 39 | NO: 56 | NO: 3 |
| | TMD and STS, with | | | | | | |
| | ZF3 replacing | | | | | | |
| | G4VP64 | | | | | | |
| pIZ361Z3 | truncated CD8 Hinge | SEQ ID | SEQ ID | SEQ ID | SEQ ID | SEQ ID | SEQ ID |
| | receptor with Notch1 | NO: 10 | NO: 21 | NO: 31 | NO: 40 | NO: 56 | NO: 4 |
| | TMD and Notch2 | | | | | | |
| | STS, with ZF3 | | | | | | |
| | replacing G4VP64 | | | | | | |
| pDP1158 | truncated CD8 Hinge | SEQ ID | SEQ ID | SEQ ID | SEQ ID | SEQ ID | SEQ ID |
| | receptor with Notch1 | NO: 10 | NO: 21 | NO: 31 | NO: 40 | NO: 55 | NO: 5 |
| | TMD and Notch2 | | | | | | |
| | STS, with ZF2 | | | | | | |
| | replacing G4VP64 | | | | | | |
| pDP1159 | truncated CD8 Hinge | SEQ ID | SEQ ID | SEQ ID | SEQ ID | SEQ ID | SEQ ID |
| | receptor with Notch1 | NO: 10 | NO: 21 | NO: 31 | NO: 40 | NO: 57 | NO: 6 |
| | TMD and Notch2 | | | | | | |
| | STS, with ZF4 | | | | | | |
| | replacing G4VP64 | | | | | | |
| pDP1160 | truncated CD8 Hinge | SEQ ID | SEQ ID | SEQ ID | SEQ ID | SEQ ID | SEQ ID |
| | receptor with Notch1 | NO: 10 | NO: 21 | NO: 31 | NO: 40 | NO: 58 | NO: 7 |
| | TMD and Notch2 | | | | | | |
| | STS, with ZF6 | | | | | | |
| | replacing G4VP64 | | | | | | |
| pDP1161 | truncated CD8 Hinge | SEQ ID | SEQ ID | SEQ ID | SEQ ID | SEQ ID | SEQ ID |
| | receptor with Notch1 | NO: 10 | NO: 21 | NO: 31 | NO: 40 | NO: 59 | NO: 8 |
| | TMD and Notch2 | | | | | | |
| | STS, with ZF10 | | | | | | |
| | replacing G4VP64 | | | | | | |
| pDP1162 | truncated CD8 Hinge | SEQ ID | SEQ ID | SEQ ID | SEQ ID | SEQ ID | SEQ ID |
| | receptor with Notch1 | NO: 10 | NO: 21 | NO: 31 | NO: 40 | NO: 60 | NO: 9 |
| | TMD and Notch2 | | | | | | |
| | STS, with Z11 | | | | | | |
| | replacing G4VP64 | | | | | | |

TABLE 2
This table provides a brief description for each of the chimeric Notch receptors and
the respective components (with components separated by hyphens). Unless otherwise
noted, the entry refers to a protein of human origin. For example, “Notch1, Notch1”
indicates that two sequence from Notch1 were fused to generate this protein module.

| Construct | | | | | | |
|---|---|---|---|---|---|---|
| ID | Receptor Description | ECD | N-JMD | TMD | STS | TF |
| pRay050Z3 | antiCD19scFv- | CD8a signal | Notch1, | Notch1 | Notch1 | synthetic |
| | Notch1deltaNRR-ZF3 | peptide, myc-tag, | Notch1 | | | zinc finger |
| | | anti-CD19 scFv | | | | ZF3 |
| pIZ621Z3 | antiCD19scFv- | CD8a signal | Notch1, | Notch1 | Notch2 | synthetic |
| | Notch1deltaNRR- | peptide, myc-tag, | Notch1 | | | zinc finger |
| | Notch2STS-ZF3 | anti-CD19 scFv | | | | ZF3 |
| pIZ343Z3 | antiCD19scFv-CD8Hinge2- | CD8a signal | truncated | Notch1 | Notch1 | synthetic |
| | Notch1TMD-ZF3 | peptide, myc-tag, | CD8 hinge | | | zinc finger |
| | | anti-CD19 scFv | | | | ZF3 |
| pIZ361Z3 | antiCD19scFv-CD8Hinge2- | CD8a signal | truncated | Notch1 | Notch2 | synthetic |
| | Notch1TMD-Notch2STS- | peptide, myc-tag, | CD8 hinge | | | zinc finger |
| | ZF3 | anti-CD19 scFv | | | | ZF3 |
| pDP1158 | antiCD19scFv-HingeNotch | CD8a signal | truncated | Notch1 | Notch2 | synthetic |
| | ZF2 p65 (Notch1TMD- | peptide, myc-tag, | CD8 hinge | | | zinc finger |
| | Notch2STS) | anti-CD19 scFv | | | | ZF2 |
| pDP1159 | antiCD19scFv-HingeNotch | CD8a signal | truncated | Notch1 | Notch2 | synthetic |
| | ZF4 p65 (Notch1TMD- | peptide, myc-tag, | CD8 hinge | | | zinc finger |
| | Notch2STS) | anti-CD19 scFv | | | | ZF4 |
| pDP1160 | antiCD19scFv-HingeNotch | CD8a signal | truncated | Notch1 | Notch2 | synthetic |
| | ZF6 p65 (Notch1TMD- | peptide, myc-tag, | CD8 hinge | | | zinc finger |
| | Notch2STS) | anti-CD19 scFv | | | | ZF6 |
| pDP1161 | antiCD19scFv-HingeNotch | CD8a signal | truncated | Notch1 | Notch2 | synthetic |
| | ZF10p65 (Notch1TMD- | peptide, myc-tag, | CD8 hinge | | | zinc finger |
| | Notch2STS) | anti-CD19 scFv | | | | ZF10 |
| pDP1162 | antiCD19scFv-HingeNotch | CD8a signal | truncated | Notch1 | Notch2 | synthetic |
| | ZF11 p65 (Notch1TMD- | peptide, myc-tag, | CD8 hinge | | | zinc finger |
| | Notch2STS) | anti-CD19 scFv | | | | ZF11 |

[0217] The chimeric receptors described in Tables 1-2 above were built by fusing a single-chain antigen-binding fragment CD19 scFv (Porter D L et al., 2011) to the corresponding receptor scaffold and a synZF protein domain fused to the human p65 transactivator.

[0218] The synthetic zinc finger-containing transcriptional effectors (synZTE) used in these experiments were minimal, modular fusions of DNA binding and effector domains that together could locally regulate the expression of genes at responsive promoters containing specific target binding sequences. The amino acid sequences of six exemplary synZTE (ZF2, ZF3, ZF4, ZF6, ZF10, and ZF11) are provided as SEQ ID NOS: 55-60 in the Sequence Listing. The engineered zinc finger (ZF) DNA binding arrays were coupled to a transcriptional effector domain (a p65 activation domain of NFκB). The engineered ZF arrays described herein were derived from native mammalian ZF scaffolds, but re-designed to target specific 18-20 nucleotide sequences that were demonstrated to be unique and orthogonal from human genome sequences. Thus, it was expected that this feature could confer reduced off-target binding and regulation potential in the human genome. The nucleotide sequences of the ZTE target binding sequences are also provided as SEQ ID NOS: 61-71 in the Sequence Listing. Corresponding responsive promoters were then designed by placing tandem ZF binding sites upstream of constitutive promoters to enable regulated gene expression control in mammalian cells. The transcriptional effector domain used in these experiments was a p65 transcriptional activator domain from NFκB.

[0219] All receptors contained an N-terminal CD8α signal peptide (SEQ ID NO: 72) for membrane targeting and a myc-tag (SEQ ID NO: 73) for suitable determination of surface expression with an antibody conjugated to a fluorescent dye (α-myc A647®, Cell Signaling Technology, Cat #2233). For the construction of these receptors, DNA fragments coding for the amino acid sequences provided in Table 1 and Sequence Listing were PCR amplified from synthesized gene fragments or plasmids containing DNA sequence for the indicated protein, and assembled using standard cloning techniques (e.g., overhang PCR, fusion PCR, and In-fusion cloning) with flanking translation start and stop sequences, into the modified lentiviral expression vector pHR′ SIN:CSW vector (K T Roybal et al., Cell (2016 Oct. 6) 167(2):419-32), which contained a phosphoglycerate kinase (PGK) promoter for all primary T cell experiments described in Example 6 below.

[0220] The pHR′ SIN:CSW vector was also modified to produce the response element plasmids. For this purpose, eight copies of the specific zinc finger target sequences were cloned 5′ to a minimal ybTATA promoter. The resulting target DNA stretches named ZF2, ZF3, ZF4, ZF6, ZF10, and ZF11. The nucleotide sequences and amino acid sequence encoded thereby are also provided in the Sequence Listing (SEQ ID NOS: 61-71). Also included in the response element plasmids was a PGK promoter that constitutively drives expression of a yellow fluorescent reporter protein (mCitrine) to suitably identify successfully transduced T cells.

[0221] For the construction of all inducible BFP vectors, the original ZF3-containing vector was modified between EcoRI and BamHI sites with a PCR-amplified copy of the corresponding zinc finger target site. All constructs were assembled using NEB HiFi Assembly (E2621S) according to the manufacturer's instructions.

### Example 2

### Primary Human T-Cell Isolation and Culture

[0222] This Example describes the isolation and culture of primary human T cells that were subsequently used in various cell transduction experiments described in Example 3 below.

[0223] In these experiments, primary CD4⁺ and CD8⁺ T cells were isolated from blood after apheresis and enriched by negative selection using human T-cell isolation kits (human CD4⁺ or CD8⁺ enrichment cocktail; STEMCELL Technologies Cat #15062 and 15063). Blood was obtained from Blood Centers of the Pacific (San Francisco, Calif.) as approved by the University Institutional Review Board. T cells were cryopreserved in growth medium (RPMI-1640, UCSF cell culture core) with 20% human AB serum (Valley Biomedical Inc., #HP1022) and 10% DMSO. After thawing, T cells were cultured in human T cell medium containing X-VIVO™ 15 (Lonza #04-418Q), 5% Human AB serum and 10 mM neutralized N-acetyl L-Cysteine (Sigma-Aldrich #A9165) supplemented with 30 units/mL IL-2 (NCI BRB Preclinical Repository) for all experiments.

### Example 3

### Human T Cells were Stably Transduced with Lentiviral Vectors

[0224] The Example describes a general protocol used for lentiviral transduction of human T cells.

[0225] Generally, lentiviral vectors pseudo-typed with vesicular stomatitis virus envelope G protein (VSV-G) (pantropic vectors) were produced via transfection of Lenti-X™ 293T cells (Clontech #11131D) with a pHR′ SIN:CSW transgene expression vector and the viral packaging plasmids pCMVdR8.91 and pMD2.G using Mirus TransIT®-Lenti (Mirus, #MIR 6606). Generally, primary T cells were thawed the same day and, after 24 hours in culture, were stimulated with beads having anti-CD3 and anti-CD28 antibodies bound to the surface (Human T-Activator CD3/CD28 Dynabeads®, Life Technologies #11131D) at a 1:3 cell:bead ratio. At 48 hours, viral supernatant was harvested and the primary T cells were exposed to the virus for 24 hours. At Day 5 post T-cell stimulation, the Dynabeads were removed, and the T cells expanded until Day 10 when they were rested and could be used in assays. T cells were sorted for assays with a Becton Dickinson (BD) FACSAria™ II flow cytometer.

### Example 4

### Cancer Cell Lines

[0226] The cancer cell lines used were K562 myelogenous leukemia cells (ATCC #CCL-243). K562 cells were lentivirally transduced to stably express human CD19 at equivalent levels as Daudi tumors. CD19 levels were determined by staining the cells with anti-CD19 APC (Biolegend #302212). All cell lines were sorted for expression of the transgenes.

### Example 5

### Generation of Reporter Jurkat T Cells

[0227] This Example describes the generation of reporter Jurkat T cells that were subsequent used for the testing of various ZTE-containing Notch receptors described herein.

[0228] In these experiments, E6-1 Jurkat T cells (ATCC #TIB-152) were lentivirally transduced with a reporter plasmid carrying an inducible BFP reporter gene and a constitutive mCitrine reporter gene, as described previously (K. T. Roybal et al., Cell, 164:1-10, 2016). Reporter-positive Jurkat cells were sorted for mCitrine expression using a Beckton Dickinson (BD) FACSAria™ II flow cytometer and expanded.

[0229] Lentiviral particles were produced with the receptor transgene expression vector as described previously (L. Morsut et al., Cell (2016) 164:780-91). Reporter-positive Jurkat cells were transduced with individual receptors and expanded for experimentation in 96 well plates.

### Example 6

### In Vitro Stimulation of Primary T Cells

[0230] This Example describes a general protocol used to demonstrate the stimulation of primary T cells in vitro by the chimeric synZTE-containing Notch receptors described herein.

[0231] For all in vitro T-cell stimulations, 1×105 T cells were co-cultured with sender cells at a 1:1 ratio in flat bottom 96-well tissue culture plates. The cultures were analyzed at 24 hours for reporter activation with a BD Fortessa™ X-50. All flow cytometry analysis was performed in FlowJo™ software (TreeStar, Inc.).

### Example 7

### Preliminary Characterization of synZTE-Containing Human Notch Receptors

[0232] This Example describes the results of experiments performed to evaluate functionality of engineered synZTE-containing human Notch receptors. As schematically illustrated in FIG. 1, existing first-generation SynNotch variants are intended to rely on the core force-sensing module of Notch (the Notch regulatory region, NRR, stretching of which leads to ligand-inducible cleavage at the S3 site) to regulate customizable intracellular transactivators with user-defined ligand binding domains. In MiniNotch variants, much of the NRR is further truncated. HingeNotch variants additionally feature disulfide-mediated oligomerization due to the insertion of a hinge domain (e.g., a hinge domain from CD8).

[0233] Three variants of synZTE-containing human Notch receptors were constructed by coupling each of the three engineered Notch receptor variants described in FIG. 1 with a synthetic zinc finger-based transcriptional effector (synZTE). As shown in FIG. 2, all of the newly constructed synZTE-containing Notch receptors contained an anti-CD19 scFv and were placed under control of a phosphoglycerate kinase (PGK) promoter. In the experiments, an 8×ZF3 response element with a synthetic ybTATA promoter was used to produce mCitrine upon activation. These experiments were all performed in a reporter+ Jurkat line that was not previously sorted. The percentage of reporter positive cells presented in FIG. 2 was calculated by dividing the +citrine positive cells by the +receptor (myc) positive cells. Separately, various response element numbers were also tested, where 8×ZF3 performs better than 4×ZF3, but 12×ZF3 and 16×ZF3 did not further improve response.

### Example 8

### Assessing Functionality of Engineered ZTE-Containing Human SynNotch Receptors

[0234] This Example describes the results of experiments performed to evaluate functionality of the new synZTE-containing human SynNotch receptors. Two variants of ZTE-containing human SynNotch receptors were constructed.

[0235] As shown in FIG. 3, an exemplary engineered human SynNotch receptor containing the synthetic zinc finger-containing transcriptional activator Z3 is shown on the left panel, which was designed based upon human Notch1 proteins. The right panel shows another exemplary engineered human SynNotch receptor containing the synthetic zinc finger-containing transcriptional activator Z10. In these experiments, Jurkat T-cells were transduced with anti-CD19 synZTE-containing Notch receptors containing either ZF3 or ZF10 with unique DNA binding specificities, along with their cognate mCitrine reporter. Reporter expression levels indicating receptor activation with antigen-negative vs. antigen-positive K562 cells was assessed after 24 hours of co-incubation. As shown in FIG. 3, both anti-CD19 synZTE-containing Notch receptors containing either ZF3 or ZF10 failed to activate expression of the reporter gene mCitrine.

[0236] The results described in this Example demonstrate that engineered ZTE-containing human SynNotch receptors fail to activate transcription of the reporter gene, unlike the Hinge-Notch receptors of the disclosure.

### Example 9

### ZTE-Containing Hinge-Notch Receptor Activation in Primary CD4⁺ T-Cells

[0237] This Example describes the results of experiments performed to demonstrate gene activation mediated by novel synZTE-containing Hinge-Notch receptors described herein in primary CD4⁺ cells. These experiments were conducted using six exemplary ZTE-containing Hinge Notch receptors which contained an anti-CD19scFv and one of the following synthetic zinc finger-containing transcriptional activators (synTFs): ZF2, ZF3, ZF4, ZF6, ZF10, and ZF11. In these experiments, primary CD4+ T-cells from two different donors were transduced with anti-CD19 ZTE-containing Hinge Notch receptors containing one of six different SynTF transactivators with unique DNA binding specificities, along with their cognate BFP-expressing reporters. Reporter expression levels indicating receptor activation with antigen-negative vs. antigen-positive K562 cells was assessed after 24 hours of co-incubation (N=2; error bars represent standard deviation). As shown in FIG. 4, the expression of the reporter gene BFP was activated by all six ZTE-containing Hinge Notch receptors. FIG. 5 shows normalized fluorescence activation profiles of the T-cells described in FIG. 4 co-incubated with antigen-negative (red) or antigen-positive (blue) K562 target cells. In addition, expression levels of the receptor (vertical axis) vs. the cognate reporter (horizontal axis) for these six ZTE-containing Hinge Notch receptors were also illustrated in FIG. 6.

[0238] The results described in this Example demonstrate that engineered ZTE-containing Hinge-Notch receptors functionally activate transcription of the reporter gene in response to antigen stimulation of the receptor.

### Example 10

### Optimization of synZTE-Containing HingeNotch Receptors

[0239] This Example describes the results of experiments performed to further optimize synZTE-containing HingeNotch receptors. In these experiments, a number of synZTE-containing HingeNotch variants were constructed by removing various additional peptide sequences therefrom and subsequently tested in Jurkat T-cells.

[0240] As shown in FIG. 7A is a sequence schematic of loci within a lentiviral expression construct for an exemplary synZTE-containing HingeNotch ZF6, i.e., pDP1160 (SEQ ID NO: 7), that were interspersed with functionally unannotated sequences. These include (i) an alanine between the HingeNotch core functional region and the nuclear localization sequence (NLS) of the synZTE-containing HingeNotch (Linker 1), (ii) several potentially non-essential regions between the NLS and zinc-finger domain consisting of a polypeptide (Linker 2), (iii) the expression product of an XhoI restriction enzyme site (Linker 3), (iv) a flexible linker glycine-serine (Linker 4), (v) the expression product KpnI and NheI restriction enzyme sites (Linker 5), and also (vi) the expression product of BamHI and SbfI site restriction enzyme sites between the zinc finger and transactivation domain p65 (Linker 6)). Additionally, the 108 bp between the p65 transactivation domain and the WPRE were replaced with an 8 bp NotI site (Linker 7). Moreover, in one construct, the full-length transactivation domain p65 was replaced with a minimal sequence starting at residue P68. The description and amino acid sequences of these anti-CD19 HingeNotch-ZF6 receptors bearing the indicated linker deletions or modifications are provided in Table 3 below and the Sequence Listing.

TABLE 3
This table provides a brief description for exemplary synZTE-containing
HingeNotch variants with their respective components.

| Construct | | | | SEQ ID |
|---|---|---|---|---|
| ID | Receptor Description | FIG. | Figure sub-region | NO |
| pDP1160 | anti-CD19 HingeNotch ZF6 p65 | 7 and 8 | 7B and 7C “N/A” | 7 |
| | | | (“Original” Construct), | |
| | | | 8 Panels A-C (“ZF6 | |
| | | | Original”) | |
| pDP1233 | anti-CD19 HingeNotch ZF6 p65 ΔA | 7 | 7B and 7C “Deletion 1” | 113 |
| pDP1234 | anti-CD19 HingeNotch ZF6 p65 | 7 | 7B and 7C “Deletion 2” | 114 |
| | Δ3xFlagseq | | | |
| pDP1235 | anti-CD19 HingeNotch ZF6 p65 | 7 | 7B and 7C “Deletion | 115 |
| | Δ3xFlagseq + A | | 1 + 2” | |
| pDP1236 | anti-CD19 HingeNotch ZF6 p65 | 7 | 7B and 7C “Deletion | 116 |
| | Δ3xFlagseq + GS Linker | | 2-5” | |
| pDP1237 | anti-CD19 HingeNotch ZF6 p65 | 7 | 7B and 7C “Deletion | 117 |
| | Δ3xFlagseq + GS Linker + A | | 1 + 2-5” | |
| pDP1238 | anti-CD19 HingeNotch ZF6 p65 | 7 | 7B and 7C “Deletion 6” | 118 |
| | ΔBamHI-TCR Linker | | | |
| pDP1239 | anti-CD19 HingeNotch ZF6 min-p65 | 7 | 7B and 7C “Deletion | 119 |
| | ΔBamHI | | 6 + p65 min” | |
| pDP1261 | anti-CD19 HingeNotch ZF6 p65 | 7 | 7B and 7C “Deletion 7” | 120 |
| | ΔPre-WPRE | | | |
| PDP1161 | anti-CD19 HingeNotch ZF10 p65 | 8 | 8A-8C (″ZF10 original) | 8 |
| pDP1306 | anti-CD19 HingeNotch ZF6 p65 | 8 | 8A-8C (″ZF6 | 121 |
| | (Minimized) ΔPre-WPRE | | Minimized) | |
| pDP1307 | anti-CD19 HingeNotch ZF10 p65 | 8 | 8A-8C (″ZF10 | 122 |
| | (Minimized) ΔPre-WPRE | | minimized) | |
| pIZ621Z3 | anti-CD19 MiniNotch ZF3 p65 | 9 | 9A and 9B “SV40 | 2 |
| | | | NLS” | |
| pDP1008 | anti-CD19miniNotch ZF3 single Notch1 | 9 | 9A and 9B “hNotch1 | 123 |
| | NLS | | NLS” | |

[0241] FIG. 7B summarizes BFP expression from Jurkat cells transduced with a ZF6BD-BFP reporter construct and a panel of anti-CD19 HingeNotch-ZF6 expression vectors bearing the indicated linker deletions or modifications. In these experiments, cells were stimulated with unmodified K562 cells (left panel) or CD19-expression K562 cells (right panel). FIG. 7C depicts percent BFP-expressing Jurkat cells (left panel) and BFP MFI (right panel) tabulated for the data presented in FIG. 7B. It was observed that all truncated receptors, with the exception of ΔLinker 1, demonstrated augmented activation relative to the original full-length receptor, i.e., pDP1160. The truncation of the p65 transactivation domain to p65 min demonstrated a noticeable decrease in activation, resulting in subsequent “fully minimized” construct designs that retain the full length transactivation domain p65.

[0242] Additional experiments were performed to further evaluate a number of synZTE-containing HingeNotch variants described in FIGS. 7A-7C in CD8+ cells. In these experiments, the expression profiles of original synZTE-containing HingeNotch receptor were compared with the partially minimized synZTE-HingeNotch variants bearing ZF6 or ZF10, as described in FIGS. 7A-7C above. As shown in FIG. 8A, the minimized versions bear none of the linker sequences deleted but retain the full-length transactivation domain p65. Notably, the minimized form of the ZF10-bearing HingeNotch receptor demonstrated improved expression relative to the original full length sequence, although the same effect was not observed in the case of ZF6.

[0243] As presented in FIG. 8B, it was observed that the minimized forms of both ZF6 and ZF10-bearing HingeNotch receptors demonstrated augmented activation relative to their original counterparts, as determined by BFP expression from the construct referenced in FIG. 8A after stimulation with unmodified or CD19-expressing K562 cells. In addition, FIG. 8C depicts the percent BFP-expressing T-cells (left panel) and BFP MFI (right panel) tabulated for the data in FIG. 8B.

### Example 11

### Modification of NLS to Modulate Receptor Activity

[0244] This Example describes the results of experiments performed to further optimize synZTE-containing HingeNotch receptors by modifying the sequences of NLS.

[0245] In these experiments, primary CD4+ T-cells were transduced with MiniNotch receptor variants bearing synthetic zinc finger-containing transcriptional activators (SynTFs) consisting of the ZF3 zinc finger and transactivation domain p65, with either the original SV40 NLS or the hNotch1 NLS. BFP expression of the transduced primary CD4+ T-cells is shown in FIG. 9A.

[0246] FIG. 9B shows mean fluorescence intensity (MFI) of BFP expression quantified for the experiment shown in FIG. 9A.

### Example 12

### Transcriptional Activation Activity of synZTE-Containing HingeNotch Receptors

[0247] This Example describes the results of experiments performed to evaluate the activation performance of synZTE-containing HingeNotch receptors relative to Gal4-VP64.

[0248] A number of exemplary synZTE-containing HingeNotch receptors with their respective components are provided in Table 4 below.

TABLE 4
Amino acid sequences of exemplary synZTE-containing HingeNotch receptors
with fused TAD domains.

| | | Seq | |
|---|---|---|---|
| | | ID | |
| Name | Description | NO | Protein Sequence |
| pDP1380 | α-CD19 | 124 | MALPVTALLLPLALLLHAARPEQKLISEEDLDIQMTQTTSSLSASL |
| | HingeNotch | | GDRVTISCRASQDISKYLNWYQQKPDGTVKLLIYHTSRLHSGVPSR |
| | ZF6-p65 | | FSGSGSGTDYSLTISNLEQEDIATYFCQQGNTLPYTFGGGTKLEIT |
| | | | GGGGSGGGGSGGGGSEVKLQESGPGLVAPSQSLSVTCTVSGVSLPD |
| | | | YGVSWIRQPPRKGLEWLGVIWGSETTYYNSALKSRLTIIKDNSKSQ |
| | | | VFLKMNSLQTDDTAIYYCAKHYYYGGSYAMDYWGQGTSVTVSSTTT |
| | | | PAPRPPTPAPTIASQPLSLRPEACFMYVAAAAFVLLFFVGCGVLLS |
| | | | KRKRKHPKKKRKVSRPGERPFQCRICMRNFSQQTNLTRHTRTHTGE |
| | | | KPFQCRICMRNFSQKANLGVHLRTHTGSQKPFQCRICMRNFSDHSS |
| | | | LKRHTRTHTGEKPFQCRICMRNFSRADMLRRHLRTHTGSQKPFQCR |
| | | | ICMRNFSEKQNLARHTRTHTGEKPFQCRICMRNFSDPSNLRRHLRT |
| | | | HLRDEFPTMVFPSGQISQASALAPAPPQVLPQAPAPAPAPAMVSAL |
| | | | AQAPAPVPVLAPGPPQAVAPPAPKPTQAGEGTLSEALLQLQFDDED |
| | | | LGALLGNSTDPAVFTDLASVDNSEFQQLLNQGIPVAPHTTEPMLME |
| | | | YPEAITRLVTGAQRPPDPAPAPLGAPGLPNGLLSGDEDFSSIADMD |
| | | | FSALLSQISS |
| pDP1381 | α-CD19 | 125 | MALPVTALLLPLALLLHAARPEQKLISEEDLDIQMTQTTSSLSASL |
| | HingeNotch | | GDRVTISCRASQDISKYLNWYQQKPDGTVKLLIYHTSRLHSGVPSR |
| | ZF6-VP64 | | FSGSGSGTDYSLTISNLEQEDIATYFCQQGNTLPYTFGGGTKLEIT |
| | | | GGGGSGGGGSGGGGSEVKLQESGPGLVAPSQSLSVTCTVSGVSLPD |
| | | | YGVSWIRQPPRKGLEWLGVIWGSETTYYNSALKSRLTIIKDNSKSQ |
| | | | VFLKMNSLQTDDTAIYYCAKHYYYGGSYAMDYWGQGTSVTVSSTTT |
| | | | PAPRPPTPAPTIASQPLSLRPEACFMYVAAAAFVLLFFVGCGVLLS |
| | | | KRKRKHPKKKRKVSRPGERPFQCRICMRNFSQQTNLTRHTRTHTGE |
| | | | KPFQCRICMRNFSQKANLGVHLRTHTGSQKPFQCRICMRNFSDHSS |
| | | | LKRHTRTHTGEKPFQCRICMRNFSRADMLRRHLRTHTGSQKPFQCR |
| | | | ICMRNFSEKQNLARHTRTHTGEKPFQCRICMRNFSDPSNLRRHLRT |
| | | | HLRDALDDFDLDMLGSDALDDFDLDMLGSDALDDFDLDMLGSDALD |
| | | | DFDLDMLGS |
| pDP1382 | α-CD19 | 126 | MALPVTALLLPLALLLHAARPEQKLISEEDLDIQMTQTTSSLSASL |
| | HingeNotch | | GDRVTISCRASQDISKYLNWYQQKPDGTVKLLIYHTSRLHSGVPSR |
| | ZF10-p65 | | FSGSGSGTDYSLTISNLEQEDIATYFCQQGNTLPYTFGGGTKLEIT |
| | | | GGGGSGGGGSGGGGSEVKLQESGPGLVAPSQSLSVTCTVSGVSLPD |
| | | | YGVSWIRQPPRKGLEWLGVIWGSETTYYNSALKSRLTIIKDNSKSQ |
| | | | VFLKMNSLQTDDTAIYYCAKHYYYGGSYAMDYWGQGTSVTVSSTTT |
| | | | PAPRPPTPAPTIASQPLSLRPEACFMYVAAAAFVLLFFVGCGVLLS |
| | | | KRKRKHPKKKRKVSRPGERPFQCRICMRNFSRRHGLDRHTRTHTGE |
| | | | KPFQCRICMRNFSDHSSLKRHLRTHTGSQKPFQCRICMRNFSVRHN |
| | | | LTRHLRTHTGEKPFQCRICMRNFSDHSNLSRHLKTHTGSQKPFQCR |
| | | | ICMRNFSQRSSLVRHLRTHTGEKPFQCRICMRNFSESGHLKRHLRT |
| | | | HLRDEFPTMVFPSGQISQASALAPAPPQVLPQAPAPAPAPAMVSAL |
| | | | AQAPAPVPVLAPGPPQAVAPPAPKPTQAGEGTLSEALLQLQFDDED |
| | | | LGALLGNSTDPAVFTDLASVDNSEFQQLLNQGIPVAPHTTEPMLME |
| | | | YPEAITRLVTGAQRPPDPAPAPLGAPGLPNGLLSGDEDFSSIADMD |
| | | | FSALLSQISS |
| pDP1383 | α-CD19 | 127 | MALPVTALLLPLALLLHAARPEQKLISEEDLDIQMTQTTSSLSASL |
| | HingeNotch | | GDRVTISCRASQDISKYLNWYQQKPDGTVKLLIYHTSRLHSGVPSR |
| | ZF10-VP64 | | FSGSGSGTDYSLTISNLEQEDIATYFCQQGNTLPYTFGGGTKLEIT |
| | | | GGGGSGGGGSGGGGSEVKLQESGPGLVAPSQSLSVTCTVSGVSLPD |
| | | | YGVSWIRQPPRKGLEWLGVIWGSETTYYNSALKSRLTIIKDNSKSQ |
| | | | VFLKMNSLQTDDTAIYYCAKHYYYGGSYAMDYWGQGTSVTVSSTTT |
| | | | PAPRPPTPAPTIASQPLSLRPEACFMYVAAAAFVLLFFVGCGVLLS |
| | | | KRKRKHPKKKRKVSRPGERPFQCRICMRNFSRRHGLDRHTRTHTGE |
| | | | KPFQCRICMRNFSDHSSLKRHLRTHTGSQKPFQCRICMRNFSVRHN |
| | | | LTRHLRTHTGEKPFQCRICMRNFSDHSNLSRHLKTHTGSQKPFQCR |
| | | | ICMRNFSQRSSLVRHLRTHTGEKPFQCRICMRNFSESGHLKRHLRT |
| | | | HLRDALDDFDLDMLGSDALDDFDLDMLGSDALDDFDLDMLGSDALD |
| | | | DFDLDMLGS |
| pDP1384 | α-CD19 | 128 | MALPVTALLLPLALLLHAARPEQKLISEEDLDIQMTQTTSSLSASL |
| | HingeNotch | | GDRVTISCRASQDISKYLNWYQQKPDGTVKLLIYHTSRLHSGVPSR |
| | Gal4-p65 | | FSGSGSGTDYSLTISNLEQEDIATYFCQQGNTLPYTFGGGTKLEIT |
| | | | GGGGSGGGGSGGGGSEVKLQESGPGLVAPSQSLSVTCTVSGVSLPD |
| | | | YGVSWIRQPPRKGLEWLGVIWGSETTYYNSALKSRLTIIKDNSKSQ |
| | | | VFLKMNSLQTDDTAIYYCAKHYYYGGSYAMDYWGQGTSVTVSSTTT |
| | | | PAPRPPTPAPTIASQPLSLRPEACFMYVAAAAFVLLFFVGCGVLLS |
| | | | KRKRKHMKLLSSIEQACDICRLKKLKCSKEKPKCAKCLKNNWECRY |
| | | | SPKTKRSPLTRAHLTEVESRLERLEQLFLLIFPREDLDMILKMDSL |
| | | | QDIKALLTGLFVQDNVNKDAVTDRLASVETDMPLTLRQHRISATSS |
| | | | SEESSNKGQRQLTVSAAAGGSGGSGGSDEFPTMVFPSGQISQASAL |
| | | | APAPPQVLPQAPAPAPAPAMVSALAQAPAPVPVLAPGPPQAVAPPA |
| | | | PKPTQAGEGTLSEALLQLQFDDEDLGALLGNSTDPAVFTDLASVDN |
| | | | SEFQQLLNQGIPVAPHTTEPMLMEYPEAITRLVTGAQRPPDPAPAP |
| | | | LGAPGLPNGLLSGDEDFSSIADMDFSALLSQISS |
| pDP1385 | α-CD19 | 129 | MALPVTALLLPLALLLHAARPEQKLISEEDLDIQMTQTTSSLSASL |
| | HingeNotch | | GDRVTISCRASQDISKYLNWYQQKPDGTVKLLIYHTSRLHSGVPSR |
| | Gal4-VP64 | | FSGSGSGTDYSLTISNLEQEDIATYFCQQGNTLPYTFGGGTKLEIT |
| | | | GGGGSGGGGSGGGGSEVKLQESGPGLVAPSQSLSVTCTVSGVSLPD |
| | | | YGVSWIRQPPRKGLEWLGVIWGSETTYYNSALKSRLTIIKDNSKSQ |
| | | | VFLKMNSLQTDDTAIYYCAKHYYYGGSYAMDYWGQGTSVTVSSTTT |
| | | | PAPRPPTPAPTIASQPLSLRPEACFMYVAAAAFVLLFFVGCGVLLS |
| | | | KRKRKHMKLLSSIEQACDICRLKKLKCSKEKPKCAKCLKNNWECRY |
| | | | SPKTKRSPLTRAHLTEVESRLERLEQLFLLIFPREDLDMILKMDSL |
| | | | QDIKALLTGLFVQDNVNKDAVTDRLASVETDMPLTLRQHRISATSS |
| | | | SEESSNKGQRQLTVSAAAGGSGGSGGSDALDDFDLDMLGSDALDDF |
| | | | DLDMLGSDALDDFDLDMLGSDALDDFDLDMLGS |
| pDP1386 | α-CD19 | 130 | MALPVTALLLPLALLLHAARPEQKLISEEDLDIQMTQTTSSLSASL |
| | HingeNotch | | GDRVTISCRASQDISKYLNWYQQKPDGTVKLLIYHTSRLHSGVPSR |
| | ZF6-p65- | | FSGSGSGTDYSLTISNLEQEDIATYFCQQGNTLPYTFGGGTKLEIT |
| | HSF1 | | GGGGSGGGGSGGGGSEVKLQESGPGLVAPSQSLSVTCTVSGVSLPD |
| | | | YGVSWIRQPPRKGLEWLGVIWGSETTYYNSALKSRLTIIKDNSKSQ |
| | | | VFLKMNSLQTDDTAIYYCAKHYYYGGSYAMDYWGQGTSVTVSSTTT |
| | | | PAPRPPTPAPTIASQPLSLRPEACFMYVAAAAFVLLFFVGCGVLLS |
| | | | KRKRKHPKKKRKVSRPGERPFQCRICMRNFSQQTNLTRHTRTHTGE |
| | | | KPFQCRICMRNFSQKANLGVHLRTHTGSQKPFQCRICMRNFSDHSS |
| | | | LKRHTRTHTGEKPFQCRICMRNFSRADMLRRHLRTHTGSQKPFQCR |
| | | | ICMRNFSEKQNLARHTRTHTGEKPFQCRICMRNFSDPSNLRRHLRT |
| | | | HLRDEFPTMVFPSGQISQASALAPAPPQVLPQAPAPAPAPAMVSAL |
| | | | AQAPAPVPVLAPGPPQAVAPPAPKPTQAGEGTLSEALLQLQFDDED |
| | | | LGALLGNSTDPAVFTDLASVDNSEFQQLLNQGIPVAPHTTEPMLME |
| | | | YPEAITRLVTGAQRPPDPAPAPLGAPGLPNGLLSGDEDFSSIADMD |
| | | | FSALLSQISSSGQGGGGSGFSVDTSALLDLFSPSVTVPDMSLPDLD |
| | | | SSLASIQELLSPQEPPRPPEAENSSPDSGKQLVHYTAQPLFLLDPG |
| | | | SVDTGSNDLPVLFELGEGSYFSEGDGFAEDPTISLLTGSEPPKAKD |
| | | | PTVS |
| pDP1387 | α-CD19 | 131 | MALPVTALLLPLALLLHAARPEQKLISEEDLDIQMTQTTSSLSASL |
| | HingeNotch | | GDRVTISCRASQDISKYLNWYQQKPDGTVKLLIYHTSRLHSGVPSR |
| | ZF6-p65- | | FSGSGSGTDYSLTISNLEQEDIATYFCQQGNTLPYTFGGGTKLEIT |
| | GR1 | | GGGGSGGGGSGGGGSEVKLQESGPGLVAPSQSLSVTCTVSGVSLPD |
| | | | YGVSWIRQPPRKGLEWLGVIWGSETTYYNSALKSRLTIIKDNSKSQ |
| | | | VFLKMNSLQTDDTAIYYCAKHYYYGGSYAMDYWGQGTSVTVSSTTT |
| | | | PAPRPPTPAPTIASQPLSLRPEACFMYVAAAAFVLLFFVGCGVLLS |
| | | | KRKRKHPKKKRKVSRPGERPFQCRICMRNFSQQTNLTRHTRTHTGE |
| | | | KPFQCRICMRNFSQKANLGVHLRTHTGSQKPFQCRICMRNFSDHSS |
| | | | LKRHTRTHTGEKPFQCRICMRNFSRADMLRRHLRTHTGSQKPFQCR |
| | | | ICMRNFSEKQNLARHTRTHTGEKPFQCRICMRNFSDPSNLRRHLRT |
| | | | HLRDEFPTMVFPSGQISQASALAPAPPQVLPQAPAPAPAPAMVSAL |
| | | | AQAPAPVPVLAPGPPQAVAPPAPKPTQAGEGTLSEALLQLQFDDED |
| | | | LGALLGNSTDPAVFTDLASVDNSEFQQLLNQGIPVAPHTTEPMLME |
| | | | YPEAITRLVTGAQRPPDPAPAPLGAPGLPNGLLSGDEDFSSIADMD |
| | | | FSALLSQISSSGQGGGGSDQSTFDILQDLEFSSGSPGKETNESPWR |
| | | | SDLLIDENCLLSPLAGEDDSFLLEGNSNED |
| pDP1388 | α-CD19 | 132 | MALPVTALLLPLALLLHAARPEQKLISEEDLDIQMTQTTSSLSASL |
| | HingeNotch | | GDRVTISCRASQDISKYLNWYQQKPDGTVKLLIYHTSRLHSGVPSR |
| | ZF10-p65- | | FSGSGSGTDYSLTISNLEQEDIATYFCQQGNTLPYTFGGGTKLEIT |
| | HSF1 | | GGGGSGGGGSGGGGSEVKLQESGPGLVAPSQSLSVTCTVSGVSLPD |
| | | | YGVSWIRQPPRKGLEWLGVIWGSETTYYNSALKSRLTIIKDNSKSQ |
| | | | VFLKMNSLQTDDTAIYYCAKHYYYGGSYAMDYWGQGTSVTVSSTTT |
| | | | PAPRPPTPAPTIASQPLSLRPEACFMYVAAAAFVLLFFVGCGVLLS |
| | | | KRKRKHPKKKRKVSRPGERPFQCRICMRNFSRRHGLDRHTRTHTGE |
| | | | KPFQCRICMRNFSDHSSLKRHLRTHTGSQKPFQCRICMRNFSVRHN |
| | | | LTRHLRTHTGEKPFQCRICMRNFSDHSNLSRHLKTHTGSQKPFQCR |
| | | | ICMRNFSQRSSLVRHLRTHTGEKPFQCRICMRNFSESGHLKRHLRT |
| | | | HLRDEFPTMVFPSGQISQASALAPAPPQVLPQAPAPAPAPAMVSAL |
| | | | AQAPAPVPVLAPGPPQAVAPPAPKPTQAGEGTLSEALLQLQFDDED |
| | | | LGALLGNSTDPAVFTDLASVDNSEFQQLLNQGIPVAPHTTEPMLME |
| | | | YPEAITRLVTGAQRPPDPAPAPLGAPGLPNGLLSGDEDFSSIADMD |
| | | | FSALLSQISSSGQGGGGSGFSVDTSALLDLFSPSVTVPDMSLPDLD |
| | | | SSLASIQELLSPQEPPRPPEAENSSPDSGKQLVHYTAQPLFLLDPG |
| | | | SVDTGSNDLPVLFELGEGSYFSEGDGFAEDPTISLLTGSEPPKAKD |
| | | | PTVS |
| pDP1389 | α-CD19 | 133 | MALPVTALLLPLALLLHAARPEQKLISEEDLDIQMTQTTSSLSASL |
| | HingeNotch | | GDRVTISCRASQDISKYLNWYQQKPDGTVKLLIYHTSRLHSGVPSR |
| | ZF10-p65- | | FSGSGSGTDYSLTISNLEQEDIATYFCQQGNTLPYTFGGGTKLEIT |
| | GR1 | | GGGGSGGGGSGGGGSEVKLQESGPGLVAPSQSLSVTCTVSGVSLPD |
| | | | YGVSWIRQPPRKGLEWLGVIWGSETTYYNSALKSRLTIIKDNSKSQ |
| | | | VFLKMNSLQTDDTAIYYCAKHYYYGGSYAMDYWGQGTSVTVSSTTT |
| | | | PAPRPPTPAPTIASQPLSLRPEACFMYVAAAAFVLLFFVGCGVLLS |
| | | | KRKRKHPKKKRKVSRPGERPFQCRICMRNFSRRHGLDRHTRTHTGE |
| | | | KPFQCRICMRNFSDHSSLKRHLRTHTGSQKPFQCRICMRNFSVRHN |
| | | | LTRHLRTHTGEKPFQCRICMRNFSDHSNLSRHLKTHTGSQKPFQCR |
| | | | ICMRNFSQRSSLVRHLRTHTGEKPFQCRICMRNFSESGHLKRHLRT |
| | | | HLRDEFPTMVFPSGQISQASALAPAPPQVLPQAPAPAPAPAMVSAL |
| | | | AQAPAPVPVLAPGPPQAVAPPAPKPTQAGEGTLSEALLQLQFDDED |
| | | | LGALLGNSTDPAVFTDLASVDNSEFQQLLNQGIPVAPHTTEPMLME |
| | | | YPEAITRLVTGAQRPPDPAPAPLGAPGLPNGLLSGDEDFSSIADMD |
| | | | FSALLSQISSSGQGGGGSDQSTFDILQDLEFSSGSPGKETNESPWR |
| | | | SDLLIDENCLLSPLAGEDDSFLLEGNSNED |

[0249] In these experiments, primary human CD4+ T-cells were transduced with α-CD19 HingeNotch receptors bearing Zinc Finger or Gal4 DNA binding domains fused to one of several transactivation domains. T-cells were co-incubated for 48 hours with K562 cells (unmodified or expressing the cognate CD19 antigen). T-cells were co-transduced with a reporter vector encoding BFP expressed by a promoter cognate to the DNA binding domain of the receptor (ZF6, ZF10, or Gal4). Fluorescence was assayed via flow cytometry. As shown in FIG. 10, the augmented transactivation domain fusions (p65-GR1 and p65-HSF1) enable HingeNotch receptors bearing zinc finger DNA binding domains to activate to an output level similar to that of the original Gal4-VP64-containing receptor, with protein expression approximately 5-7 fold higher than with a transactivation domain consisting solely of the p65 TAD.

### Example 13

### Specific Target Cell Killing Via synZTE-Containing HingeNotch Receptors

[0250] This Example describes the specific target cell killing via synZTE-containing HingeNotch receptors.

[0251] The exemplary synZTE-containing HingeNotch receptors with their respective components are provided in Table 5 below.

TABLE 5
Amino acid sequences of exemplary synZTE-containing HingeNotch receptors
with fused TAD domains used in this Example.

| | | Seq | |
|---|---|---|---|
| Name | Description | ID NO | Protein Sequence |
| pDP1338 | α-ALPPL2 | 134 | MALPVTALLLPLALLLHAARPEQKLISEEDLQVQLQQSGGGLVKPGGSL |
| | HingeNotch | | RLSCAASGFTFSSYAMHWVRQAPGKGLEWVAVISYDGSNKYYADSVKGR |
| | ZF6 | | FTISRDNSKNTLYLQMDSLRAEDTAVYYCAKEGDSSRWSYDLWGRGTLV |
| | p65 | | TVSSGGGGSGGGGSGGGGSQSALTQPASVSGSPGQSITISCTGTSSDVG |
| | | | GYNYVSWYQQHPGKAPKVMIYDVTNRPSGVSNRFSGSKSGNTASLTISG |
| | | | LQAEDEADYYCSSYTIASTLVVFGGGTKLTVLTTTPAPRPPTPAPTIAS |
| | | | QPLSLRPEACFMYVAAAAFVLLFFVGCGVLLSKRKRKHPKKKRKVSRPG |
| | | | ERPFQCRICMRNFSQQTNLTRHTRTHTGEKPFQCRICMRNFSQKANLGV |
| | | | HLRTHTGSQKPFQCRICMRNFSDHSSLKRHTRTHTGEKPFQCRICMRNF |
| | | | SRADMLRRHLRTHTGSQKPFQCRICMRNFSEKQNLARHTRTHTGEKPFQ |
| | | | CRICMRNFSDPSNLRRHLRTHLRDEFPTMVFPSGQISQASALAPAPPQV |
| | | | LPQAPAPAPAPAMVSALAQAPAPVPVLAPGPPQAVAPPAPKPTQAGEGT |
| | | | LSEALLQLQFDDEDLGALLGNSTDPAVFTDLASVDNSEFQQLLNQGIPV |
| | | | APHTTEPMLMEYPEAITRLVTGAQRPPDPAPAPLGAPGLPNGLLSGDED |
| | | | FSSIADMDFSALLSQISS |
| pDP1339 | α-ALPPL2 | 135 | MALPVTALLLPLALLLHAARPEQKLISEEDLQVQLQQSGGGLVKPGGSL |
| | HingeNotch | | RLSCAASGFTFSSYAMHWVRQAPGKGLEWVAVISYDGSNKYYADSVKGR |
| | ZF6 | | FTISRDNSKNTLYLQMDSLRAEDTAVYYCAKEGDSSRWSYDLWGRGTLV |
| | p65 | | TVSSGGGGSGGGGSGGGGSQSALTQPASVSGSPGQSITISCTGTSSDVG |
| | HSF1 | | GYNYVSWYQQHPGKAPKVMIYDVTNRPSGVSNRFSGSKSGNTASLTISG |
| | | | LQAEDEADYYCSSYTIASTLVVFGGGTKLTVLTTTPAPRPPTPAPTIAS |
| | | | QPLSLRPEACFMYVAAAAFVLLFFVGCGVLLSKRKRKHPKKKRKVSRPG |
| | | | ERPFQCRICMRNFSQQTNLTRHTRTHTGEKPFQCRICMRNFSQKANLGV |
| | | | HLRTHTGSQKPFQCRICMRNFSDHSSLKRHTRTHTGEKPFQCRICMRNF |
| | | | SRADMLRRHLRTHTGSQKPFQCRICMRNFSEKQNLARHTRTHTGEKPFQ |
| | | | CRICMRNFSDPSNLRRHLRTHLRDEFPTMVFPSGQISQASALAPAPPQV |
| | | | LPQAPAPAPAPAMVSALAQAPAPVPVLAPGPPQAVAPPAPKPTQAGEGT |
| | | | LSEALLQLQFDDEDLGALLGNSTDPAVFTDLASVDNSEFQQLLNQGIPV |
| | | | APHTTEPMLMEYPEAITRLVTGAQRPPDPAPAPLGAPGLPNGLLSGDED |
| | | | FSSIADMDFSALLSQISSSGQGGGGSGFSVDTSALLDLFSPSVTVPDMS |
| | | | LPDLDSSLASIQELLSPQEPPRPPEAENSSPDSGKQLVHYTAQPLFLLD |
| | | | PGSVDTGSNDLPVLFELGEGSYFSEGDGFAEDPTISLLTGSEPPKAKDP |
| | | | TVS |
| pDP1340 | α-ALPPL2 | 136 | MALPVTALLLPLALLLHAARPEQKLISEEDLQVQLQQSGGGLVKPGGSL |
| | HingeNotch | | RLSCAASGFTFSSYAMHWVRQAPGKGLEWVAVISYDGSNKYYADSVKGR |
| | ZF6 | | FTISRDNSKNTLYLQMDSLRAEDTAVYYCAKEGDSSRWSYDLWGRGTLV |
| | p65 GR1 | | TVSSGGGGSGGGGSGGGGSQSALTQPASVSGSPGQSITISCTGTSSDVG |
| | | | GYNYVSWYQQHPGKAPKVMIYDVTNRPSGVSNRFSGSKSGNTASLTISG |
| | | | LQAEDEADYYCSSYTIASTLVVFGGGTKLTVLTTTPAPRPPTPAPTIAS |
| | | | QPLSLRPEACFMYVAAAAFVLLFFVGCGVLLSKRKRKHPKKKRKVSRPG |
| | | | ERPFQCRICMRNFSQQTNLTRHTRTHTGEKPFQCRICMRNFSQKANLGV |
| | | | HLRTHTGSQKPFQCRICMRNFSDHSSLKRHTRTHTGEKPFQCRICMRNF |
| | | | SRADMLRRHLRTHTGSQKPFQCRICMRNFSEKQNLARHTRTHTGEKPFQ |
| | | | CRICMRNFSDPSNLRRHLRTHLRDEFPTMVFPSGQISQASALAPAPPQV |
| | | | LPQAPAPAPAPAMVSALAQAPAPVPVLAPGPPQAVAPPAPKPTQAGEGT |
| | | | LSEALLQLQFDDEDLGALLGNSTDPAVFTDLASVDNSEFQQLLNQGIPV |
| | | | APHTTEPMLMEYPEAITRLVTGAQRPPDPAPAPLGAPGLPNGLLSGDED |
| | | | FSSIADMDFSALLSQISSSGQGGGGSDQSTFDILQDLEFSSGSPGKETN |
| | | | ESPWRSDLLIDENCLLSPLAGEDDSFLLEGNSNED |
| pDP1341 | α-ALPPL2 | 137 | MALPVTALLLPLALLLHAARPEQKLISEEDLQVQLQQSGGGLVKPGGSL |
| | HingeNotch | | RLSCAASGFTFSSYAMHWVRQAPGKGLEWVAVISYDGSNKYYADSVKGR |
| | ZF6 | | FTISRDNSKNTLYLQMDSLRAEDTAVYYCAKEGDSSRWSYDLWGRGTLV |
| | p65 | | TVSSGGGGSGGGGSGGGGSQSALTQPASVSGSPGQSITISCTGTSSDVG |
| | Notch1NLS | | GYNYVSWYQQHPGKAPKVMIYDVTNRPSGVSNRFSGSKSGNTASLTISG |
| | | | LQAEDEADYYCSSYTIASTLVVFGGGTKLTVLTTTPAPRPPTPAPTIAS |
| | | | QPLSLRPEACFMYVAAAAFVLLFFVGCGVLLSKRKRKHRRKKSRPGERP |
| | | | FQCRICMRNFSQQTNLTRHTRTHTGEKPFQCRICMRNFSQKANLGVHLR |
| | | | THTGSQKPFQCRICMRNFSDHSSLKRHTRTHTGEKPFQCRICMRNFSRA |
| | | | DMLRRHLRTHTGSQKPFQCRICMRNFSEKQNLARHTRTHTGEKPFQCRI |
| | | | CMRNFSDPSNLRRHLRTHLRDEFPTMVFPSGQISQASALAPAPPQVLPQ |
| | | | APAPAPAPAMVSALAQAPAPVPVLAPGPPQAVAPPAPKPTQAGEGTLSE |
| | | | ALLQLQFDDEDLGALLGNSTDPAVFTDLASVDNSEFQQLLNQGIPVAPH |
| | | | TTEPMLMEYPEAITRLVTGAQRPPDPAPAPLGAPGLPNGLLSGDEDFSS |
| | | | IADMDFSALLSQISS |
| pDP1342 | α-ALPPL2 | 138 | MALPVTALLLPLALLLHAARPEQKLISEEDLQVQLQQSGGGLVKPGGSL |
| | HingeNotch | | RLSCAASGFTFSSYAMHWVRQAPGKGLEWVAVISYDGSNKYYADSVKGR |
| | ZF6 | | FTISRDNSKNTLYLQMDSLRAEDTAVYYCAKEGDSSRWSYDLWGRGTLV |
| | p65 | | TVSSGGGGSGGGGSGGGGSQSALTQPASVSGSPGQSITISCTGTSSDVG |
| | HSF1 | | GYNYVSWYQQHPGKAPKVMIYDVTNRPSGVSNRFSGSKSGNTASLTISG |
| | Notch1NLS | | LQAEDEADYYCSSYTIASTLVVFGGGTKLTVLTTTPAPRPPTPAPTIAS |
| | | | QPLSLRPEACFMYVAAAAFVLLFFVGCGVLLSKRKRKHRRKKSRPGERP |
| | | | FQCRICMRNFSQQTNLTRHTRTHTGEKPFQCRICMRNFSQKANLGVHLR |
| | | | THTGSQKPFQCRICMRNFSDHSSLKRHTRTHTGEKPFQCRICMRNFSRA |
| | | | DMLRRHLRTHTGSQKPFQCRICMRNFSEKQNLARHTRTHTGEKPFQCRI |
| | | | CMRNFSDPSNLRRHLRTHLRDEFPTMVFPSGQISQASALAPAPPQVLPQ |
| | | | APAPAPAPAMVSALAQAPAPVPVLAPGPPQAVAPPAPKPTQAGEGTLSE |
| | | | ALLQLQFDDEDLGALLGNSTDPAVFTDLASVDNSEFQQLLNQGIPVAPH |
| | | | TTEPMLMEYPEAITRLVTGAQRPPDPAPAPLGAPGLPNGLLSGDEDFSS |
| | | | IADMDFSALLSQISSSGQGGGGSGFSVDTSALLDLFSPSVTVPDMSLPD |
| | | | LDSSLASIQELLSPQEPPRPPEAENSSPDSGKQLVHYTAQPLFLLDPGS |
| | | | VDTGSNDLPVLFELGEGSYFSEGDGFAEDPTISLLTGSEPPKAKDPTVS |
| pDP1343 | α-ALPPL2 | 139 | MALPVTALLLPLALLLHAARPEQKLISEEDLQVQLQQSGGGLVKPGGSL |
| | HingeNotch | | RLSCAASGFTFSSYAMHWVRQAPGKGLEWVAVISYDGSNKYYADSVKGR |
| | ZF6 | | FTISRDNSKNTLYLQMDSLRAEDTAVYYCAKEGDSSRWSYDLWGRGTLV |
| | p65 GR1 | | TVSSGGGGSGGGGSGGGGSQSALTQPASVSGSPGQSITISCTGTSSDVG |
| | Notch1NLS | | GYNYVSWYQQHPGKAPKVMIYDVTNRPSGVSNRFSGSKSGNTASLTISG |
| | | | LQAEDEADYYCSSYTIASTLVVFGGGTKLTVLTTTPAPRPPTPAPTIAS |
| | | | QPLSLRPEACFMYVAAAAFVLLFFVGCGVLLSKRKRKHRRKKSRPGERP |
| | | | FQCRICMRNFSQQTNLTRHTRTHTGEKPFQCRICMRNFSQKANLGVHLR |
| | | | THTGSQKPFQCRICMRNFSDHSSLKRHTRTHTGEKPFQCRICMRNFSRA |
| | | | DMLRRHLRTHTGSQKPFQCRICMRNFSEKQNLARHTRTHTGEKPFQCRI |
| | | | CMRNFSDPSNLRRHLRTHLRDEFPTMVFPSGQISQASALAPAPPQVLPQ |
| | | | APAPAPAPAMVSALAQAPAPVPVLAPGPPQAVAPPAPKPTQAGEGTLSE |
| | | | ALLQLQFDDEDLGALLGNSTDPAVFTDLASVDNSEFQQLLNQGIPVAPH |
| | | | TTEPMLMEYPEAITRLVTGAQRPPDPAPAPLGAPGLPNGLLSGDEDFSS |
| | | | IADMDFSALLSQISSSGQGGGGSDQSTFDILQDLEFSSGSPGKETNESP |
| | | | WRSDLLIDENCLLSPLAGEDDSFLLEGNSNED |
| pDP1344 | α-ALPPL2 | 140 | MALPVTALLLPLALLLHAARPEQKLISEEDLQVQLQQSGGGLVKPGGSL |
| | HingeNotch | | RLSCAASGFTFSSYAMHWVRQAPGKGLEWVAVISYDGSNKYYADSVKGR |
| | ZF10 | | FTISRDNSKNTLYLQMDSLRAEDTAVYYCAKEGDSSRWSYDLWGRGTLV |
| | p65 | | TVSSGGGGSGGGGSGGGGSQSALTQPASVSGSPGQSITISCTGTSSDVG |
| | | | GYNYVSWYQQHPGKAPKVMIYDVTNRPSGVSNRFSGSKSGNTASLTISG |
| | | | LQAEDEADYYCSSYTIASTLVVFGGGTKLTVLTTTPAPRPPTPAPTIAS |
| | | | QPLSLRPEACFMYVAAAAFVLLFFVGCGVLLSKRKRKHPKKKRKVSRPG |
| | | | ERPFQCRICMRNFSRRHGLDRHTRTHTGEKPFQCRICMRNFSDHSSLKR |
| | | | HLRTHTGSQKPFQCRICMRNFSVRHNLTRHLRTHTGEKPFQCRICMRNF |
| | | | SDHSNLSRHLKTHTGSQKPFQCRICMRNFSQRSSLVRHLRTHTGEKPFQ |
| | | | CRICMRNFSESGHLKRHLRTHLRDEFPTMVFPSGQISQASALAPAPPQV |
| | | | LPQAPAPAPAPAMVSALAQAPAPVPVLAPGPPQAVAPPAPKPTQAGEGT |
| | | | LSEALLQLQFDDEDLGALLGNSTDPAVFTDLASVDNSEFQQLLNQGIPV |
| | | | APHTTEPMLMEYPEAITRLVTGAQRPPDPAPAPLGAPGLPNGLLSGDED |
| | | | FSSIADMDFSALLSQISS |
| pDP1345 | α-ALPPL2 | 141 | MALPVTALLLPLALLLHAARPEQKLISEEDLQVQLQQSGGGLVKPGGSL |
| | HingeNotch | | RLSCAASGFTFSSYAMHWVRQAPGKGLEWVAVISYDGSNKYYADSVKGR |
| | ZF10 | | FTISRDNSKNTLYLQMDSLRAEDTAVYYCAKEGDSSRWSYDLWGRGTLV |
| | p65 | | TVSSGGGGSGGGGSGGGGSQSALTQPASVSGSPGQSITISCTGTSSDVG |
| | HSF1 | | GYNYVSWYQQHPGKAPKVMIYDVTNRPSGVSNRFSGSKSGNTASLTISG |
| | | | LQAEDEADYYCSSYTIASTLVVFGGGTKLTVLTTTPAPRPPTPAPTIAS |
| | | | QPLSLRPEACFMYVAAAAFVLLFFVGCGVLLSKRKRKHPKKKRKVSRPG |
| | | | ERPFQCRICMRNFSRRHGLDRHTRTHTGEKPFQCRICMRNFSDHSSLKR |
| | | | HLRTHTGSQKPFQCRICMRNFSVRHNLTRHLRTHTGEKPFQCRICMRNF |
| | | | SDHSNLSRHLKTHTGSQKPFQCRICMRNFSQRSSLVRHLRTHTGEKPFQ |
| | | | CRICMRNFSESGHLKRHLRTHLRDEFPTMVFPSGQISQASALAPAPPQV |
| | | | LPQAPAPAPAPAMVSALAQAPAPVPVLAPGPPQAVAPPAPKPTQAGEGT |
| | | | LSEALLQLQFDDEDLGALLGNSTDPAVFTDLASVDNSEFQQLLNQGIPV |
| | | | APHTTEPMLMEYPEAITRLVTGAQRPPDPAPAPLGAPGLPNGLLSGDED |
| | | | FSSIADMDFSALLSQISSSGQGGGGSGFSVDTSALLDLFSPSVTVPDMS |
| | | | LPDLDSSLASIQELLSPQEPPRPPEAENSSPDSGKQLVHYTAQPLFLLD |
| | | | PGSVDTGSNDLPVLFELGEGSYFSEGDGFAEDPTISLLTGSEPPKAKDP |
| | | | TVS |
| pDP1346 | α-ALPPL2 | 142 | MALPVTALLLPLALLLHAARPEQKLISEEDLQVQLQQSGGGLVKPGGSL |
| | HingeNotch | | RLSCAASGFTFSSYAMHWVRQAPGKGLEWVAVISYDGSNKYYADSVKGR |
| | ZF10 | | FTISRDNSKNTLYLQMDSLRAEDTAVYYCAKEGDSSRWSYDLWGRGTLV |
| | p65 GR1 | | TVSSGGGGSGGGGSGGGGSQSALTQPASVSGSPGQSITISCTGTSSDVG |
| | | | GYNYVSWYQQHPGKAPKVMIYDVTNRPSGVSNRFSGSKSGNTASLTISG |
| | | | LQAEDEADYYCSSYTIASTLVVFGGGTKLTVLTTTPAPRPPTPAPTIAS |
| | | | QPLSLRPEACFMYVAAAAFVLLFFVGCGVLLSKRKRKHPKKKRKVSRPG |
| | | | ERPFQCRICMRNFSRRHGLDRHTRTHTGEKPFQCRICMRNFSDHSSLKR |
| | | | HLRTHTGSQKPFQCRICMRNFSVRHNLTRHLRTHTGEKPFQCRICMRNF |
| | | | SDHSNLSRHLKTHTGSQKPFQCRICMRNFSQRSSLVRHLRTHTGEKPFQ |
| | | | CRICMRNFSESGHLKRHLRTHLRDEFPTMVFPSGQISQASALAPAPPQV |
| | | | LPQAPAPAPAPAMVSALAQAPAPVPVLAPGPPQAVAPPAPKPTQAGEGT |
| | | | LSEALLQLQFDDEDLGALLGNSTDPAVFTDLASVDNSEFQQLLNQGIPV |
| | | | APHTTEPMLMEYPEAITRLVTGAQRPPDPAPAPLGAPGLPNGLLSGDED |
| | | | FSSIADMDFSALLSQISSSGQGGGGSDQSTFDILQDLEFSSGSPGKETN |
| | | | ESPWRSDLLIDENCLLSPLAGEDDSFLLEGNSNED |
| pDP1347 | α-ALPPL2 | 143 | MALPVTALLLPLALLLHAARPEQKLISEEDLQVQLQQSGGGLVKPGGSL |
| | HingeNotch | | RLSCAASGFTFSSYAMHWVRQAPGKGLEWVAVISYDGSNKYYADSVKGR |
| | ZF10 | | FTISRDNSKNTLYLQMDSLRAEDTAVYYCAKEGDSSRWSYDLWGRGTLV |
| | p65 | | TVSSGGGGSGGGGSGGGGSQSALTQPASVSGSPGQSITISCTGTSSDVG |
| | Notch1NLS | | GYNYVSWYQQHPGKAPKVMIYDVTNRPSGVSNRFSGSKSGNTASLTISG |
| | | | LQAEDEADYYCSSYTIASTLVVFGGGTKLTVLTTTPAPRPPTPAPTIAS |
| | | | QPLSLRPEACFMYVAAAAFVLLFFVGCGVLLSKRKRKHRRKKSRPGERP |
| | | | FQCRICMRNFSRRHGLDRHTRTHTGEKPFQCRICMRNFSDHSSLKRHLR |
| | | | THTGSQKPFQCRICMRNFSVRHNLTRHLRTHTGEKPFQCRICMRNFSDH |
| | | | SNLSRHLKTHTGSQKPFQCRICMRNFSQRSSLVRHLRTHTGEKPFQCRI |
| | | | CMRNFSESGHLKRHLRTHLRDEFPTMVFPSGQISQASALAPAPPQVLPQ |
| | | | APAPAPAPAMVSALAQAPAPVPVLAPGPPQAVAPPAPKPTQAGEGTLSE |
| | | | ALLQLQFDDEDLGALLGNSTDPAVFTDLASVDNSEFQQLLNQGIPVAPH |
| | | | TTEPMLMEYPEAITRLVTGAQRPPDPAPAPLGAPGLPNGLLSGDEDFSS |
| | | | IADMDFSALLSQISS |
| pDP1348 | α-ALPPL2 | 144 | MALPVTALLLPLALLLHAARPEQKLISEEDLQVQLQQSGGGLVKPGGSL |
| | HingeNotch | | RLSCAASGFTFSSYAMHWVRQAPGKGLEWVAVISYDGSNKYYADSVKGR |
| | ZF10 | | FTISRDNSKNTLYLQMDSLRAEDTAVYYCAKEGDSSRWSYDLWGRGTLV |
| | p65 | | TVSSGGGGSGGGGSGGGGSQSALTQPASVSGSPGQSITISCTGTSSDVG |
| | HSF1 | | GYNYVSWYQQHPGKAPKVMIYDVTNRPSGVSNRFSGSKSGNTASLTISG |
| | Notch1NLS | | LQAEDEADYYCSSYTIASTLVVFGGGTKLTVLTTTPAPRPPTPAPTIAS |
| | | | QPLSLRPEACFMYVAAAAFVLLFFVGCGVLLSKRKRKHRRKKSRPGERP |
| | | | FQCRICMRNFSRRHGLDRHTRTHTGEKPFQCRICMRNFSDHSSLKRHLR |
| | | | THTGSQKPFQCRICMRNFSVRHNLTRHLRTHTGEKPFQCRICMRNFSDH |
| | | | SNLSRHLKTHTGSQKPFQCRICMRNFSQRSSLVRHLRTHTGEKPFQCRI |
| | | | CMRNFSESGHLKRHLRTHLRDEFPTMVFPSGQISQASALAPAPPQVLPQ |
| | | | APAPAPAPAMVSALAQAPAPVPVLAPGPPQAVAPPAPKPTQAGEGTLSE |
| | | | ALLQLQFDDEDLGALLGNSTDPAVFTDLASVDNSEFQQLLNQGIPVAPH |
| | | | TTEPMLMEYPEAITRLVTGAQRPPDPAPAPLGAPGLPNGLLSGDEDFSS |
| | | | IADMDFSALLSQISSSGQGGGGSGFSVDTSALLDLFSPSVTVPDMSLPD |
| | | | LDSSLASIQELLSPQEPPRPPEAENSSPDSGKQLVHYTAQPLFLLDPGS |
| | | | VDTGSNDLPVLFELGEGSYFSEGDGFAEDPTISLLTGSEPPKAKDPTVS |
| pDP1349 | α-ALPPL2 | 145 | MALPVTALLLPLALLLHAARPEQKLISEEDLQVQLQQSGGGLVKPGGSL |
| | HingeNotch | | RLSCAASGFTFSSYAMHWVRQAPGKGLEWVAVISYDGSNKYYADSVKGR |
| | ZF10 | | FTISRDNSKNTLYLQMDSLRAEDTAVYYCAKEGDSSRWSYDLWGRGTLV |
| | p65 GR1 | | TVSSGGGGSGGGGSGGGGSQSALTQPASVSGSPGQSITISCTGTSSDVG |
| | Notch1NLS | | GYNYVSWYQQHPGKAPKVMIYDVTNRPSGVSNRFSGSKSGNTASLTISG |
| | | | LQAEDEADYYCSSYTIASTLVVFGGGTKLTVLTTTPAPRPPTPAPTIAS |
| | | | QPLSLRPEACFMYVAAAAFVLLFFVGCGVLLSKRKRKHRRKKSRPGERP |
| | | | FQCRICMRNFSRRHGLDRHTRTHTGEKPFQCRICMRNFSDHSSLKRHLR |
| | | | THTGSQKPFQCRICMRNFSVRHNLTRHLRTHTGEKPFQCRICMRNFSDH |
| | | | SNLSRHLKTHTGSQKPFQCRICMRNFSQRSSLVRHLRTHTGEKPFQCRI |
| | | | CMRNFSESGHLKRHLRTHLRDEFPTMVFPSGQISQASALAPAPPQVLPQ |
| | | | APAPAPAPAMVSALAQAPAPVPVLAPGPPQAVAPPAPKPTQAGEGTLSE |
| | | | ALLQLQFDDEDLGALLGNSTDPAVFTDLASVDNSEFQQLLNQGIPVAPH |
| | | | TTEPMLMEYPEAITRLVTGAQRPPDPAPAPLGAPGLPNGLLSGDEDFSS |
| | | | IADMDFSALLSQISSSGQGGGGSDQSTFDILQDLEFSSGSPGKETNESP |
| | | | WRSDLLIDENCLLSPLAGEDDSFLLEGNSNED |
| pDP1 | α-ALPPL2 | 162 | ATGGCGTTGCCTGTCACGGCACTGCTCCTTCCCCTTGCACTTCTTCTTC |
| 344 | HingeNotch | | ATGCAGCTCGCCCCGAGCAGAAATTGATCTCCGAAGAAGACCTTCAGGT |
| | ZF10 p65 | | CCAACTGCAGCAATCAGGTGGAGGACTTGTGAAACCAGGAGGGAGTCTG |
| | | | AGGCTTAGCTGCGCAGCGAGTGGGTTTACTTTCTCTAGTTACGCCATGC |
| | | | ACTGGGTGCGCCAAGCCCCCGGGAAAGGACTGGAGTGGGTCGCTGTTAT |
| | | | TTCATATGACGGGTCAAATAAATACTACGCCGATTCAGTAAAGGGTCGA |
| | | | TTTACTATATCTAGGGACAACAGTAAGAACACACTTTATCTGCAGATGG |
| | | | ATAGCCTGCGGGCGGAGGACACTGCAGTCTACTATTGCGCGAAGGAAGG |
| | | | AGACAGCTCACGCTGGAGCTACGACCTCTGGGGAAGGGGGACTCTCGTA |
| | | | ACGGTGTCATCCGGCGGTGGCGGCAGCGGTGGTGGTGGATCAGGGGGAG |
| | | | GGGGGTCTCAGTCAGCACTCACCCAACCCGCATCCGTGTCTGGTAGTCC |
| | | | GGGCCAGAGTATTACTATCTCCTGTACTGGGACATCCTCCGACGTTGGG |
| | | | GGCTATAACTACGTCAGCTGGTATCAACAGCACCCTGGTAAGGCACCCA |
| | | | AGGTAATGATCTATGATGTGACAAACAGACCCAGCGGTGTTTCTAACCG |
| | | | ATTTAGCGGTTCAAAATCAGGTAACACCGCAAGCCTTACCATATCTGGT |
| | | | CTCCAGGCTGAAGACGAAGCCGACTATTACTGCAGCAGCTATACCATAG |
| | | | CCTCTACACTGGTTGTCTTCGGAGGAGGCACTAAGCTGACTGTGCTAAC |
| | | | CACGACGCCAGCGCCGCGACCACCAACACCGGCGCCCACCATCGCGTCG |
| | | | CAGCCCCTGTCCCTGCGCCCAGAGGCGTGCTTTATGTACGTGGCAGCCG |
| | | | CGGCATTTGTACTTCTGTTTTTCGTGGGGTGCGGTGTGCTTCTCAGCAA |
| | | | GAGGAAACGGAAGCACcccaagaaaaagaggaaggtgTCTAGACCCGGA |
| | | | GAGCGCCCATTCCAGTGTCGGATTTGCATGCGGAACTTTTCGAGAAGAC |
| | | | ACGGCCTGGACAGACATACCCGTACTCATACAGGTGAAAAACCCTTTCA |
| | | | GTGTCGGATCTGTATGCGAAATTTCTCCGACCACAGCAGCCTGAAGAGA |
| | | | CATCTACGTACCCACACCGGCAGCCAGAAGCCATTTCAGTGTCGGATCT |
| | | | GTATGCGGAACTTCTCCGTGAGACACAACCTGACCAGACATCTACGTAC |
| | | | GCACACCGGAGAGAAGCCATTCCAATGCCGAATATGCATGCGCAACTTC |
| | | | AGTGACCACAGCAACCTGAGCAGACACCTAAAAACCCACACCGGTTCCC |
| | | | AGAAGCCATTTCAGTGTCGGATCTGTATGCGGAACTTCTCCCAGCGCAG |
| | | | CAGCCTGGTGAGACATCTACGTACGCACACCGGAGAGAAGCCATTCCAA |
| | | | TGCCGAATATGCATGCGCAACTTCAGTGAGAGCGGCCACCTGAAGAGAC |
| | | | ACCTGCGTACGCACCTGAGGGATGAGTTTCCCACCATGGTGTTTCCTTC |
| | | | TGGGCAGATCAGCCAGGCCTCGGCCTTGGCCCCGGCCCCTCCCCAAGTC |
| | | | CTGCCCCAGGCTCCAGCCCCTGCCCCTGCTCCAGCCATGGTATCAGCTC |
| | | | TGGCCCAGGCCCCAGCCCCTGTCCCAGTCCTAGCCCCAGGCCCTCCTCA |
| | | | GGCTGTGGCCCCACCTGCCCCCAAGCCCACCCAGGCTGGGGAAGGAACG |
| | | | CTGTCAGAGGCCCTGCTGCAGCTGCAGTTTGATGATGAAGACCTGGGGG |
| | | | CCTTGCTTGGCAACAGCACAGACCCAGCTGTGTTCACAGACCTGGCATC |
| | | | CGTCGACAACTCCGAGTTTCAGCAGCTGCTGAACCAGGGCATACCTGTG |
| | | | GCCCCCCACACAACTGAGCCCATGCTGATGGAGTACCCTGAGGCTATAA |
| | | | CTCGCCTAGTGACAGGGGCCCAGAGGCCCCCCGACCCAGCTCCTGCTCC |
| | | | ACTGGGGGCCCCGGGGCTCCCCAATGGCCTCCTTTCAGGAGATGAAGAC |
| | | | TTCTCCTCCATTGCGGACATGGACTTCTCAGCCCTGCTGAGTCAGATCA |
| | | | GCTCC |
| pDP1 | α-ALPPL2 | 163 | ATGGCGTTGCCTGTCACGGCACTGCTCCTTCCCCTTGCACTTCTTCTTC |
| 345 | HingeNotch | | ATGCAGCTCGCCCCGAGCAGAAATTGATCTCCGAAGAAGACCTTCAGGT |
| | ZF10 p65 | | CCAACTGCAGCAATCAGGTGGAGGACTTGTGAAACCAGGAGGGAGTCTG |
| | HSF1 | | AGGCTTAGCTGCGCAGCGAGTGGGTTTACTTTCTCTAGTTACGCCATGC |
| | | | ACTGGGTGCGCCAAGCCCCCGGGAAAGGACTGGAGTGGGTCGCTGTTAT |
| | | | TTCATATGACGGGTCAAATAAATACTACGCCGATTCAGTAAAGGGTCGA |
| | | | TTTACTATATCTAGGGACAACAGTAAGAACACACTTTATCTGCAGATGG |
| | | | ATAGCCTGCGGGCGGAGGACACTGCAGTCTACTATTGCGCGAAGGAAGG |
| | | | AGACAGCTCACGCTGGAGCTACGACCTCTGGGGAAGGGGGACTCTCGTA |
| | | | ACGGTGTCATCCGGCGGTGGCGGCAGCGGTGGTGGTGGATCAGGGGGAG |
| | | | GGGGGTCTCAGTCAGCACTCACCCAACCCGCATCCGTGTCTGGTAGTCC |
| | | | GGGCCAGAGTATTACTATCTCCTGTACTGGGACATCCTCCGACGTTGGG |
| | | | GGCTATAACTACGTCAGCTGGTATCAACAGCACCCTGGTAAGGCACCCA |
| | | | AGGTAATGATCTATGATGTGACAAACAGACCCAGCGGTGTTTCTAACCG |
| | | | ATTTAGCGGTTCAAAATCAGGTAACACCGCAAGCCTTACCATATCTGGT |
| | | | CTCCAGGCTGAAGACGAAGCCGACTATTACTGCAGCAGCTATACCATAG |
| | | | CCTCTACACTGGTTGTCTTCGGAGGAGGCACTAAGCTGACTGTGCTAAC |
| | | | CACGACGCCAGCGCCGCGACCACCAACACCGGCGCCCACCATCGCGTCG |
| | | | CAGCCCCTGTCCCTGCGCCCAGAGGCGTGCTTTATGTACGTGGCAGCCG |
| | | | CGGCATTTGTACTTCTGTTTTTCGTGGGGTGCGGTGTGCTTCTCAGCAA |
| | | | GAGGAAACGGAAGCACcccaagaaaaagaggaaggtgTCTAGACCCGGA |
| | | | GAGCGCCCATTCCAGTGTCGGATTTGCATGCGGAACTTTTCGAGAAGAC |
| | | | ACGGCCTGGACAGACATACCCGTACTCATACAGGTGAAAAACCCTTTCA |
| | | | GTGTCGGATCTGTATGCGAAATTTCTCCGACCACAGCAGCCTGAAGAGA |
| | | | CATCTACGTACCCACACCGGCAGCCAGAAGCCATTTCAGTGTCGGATCT |
| | | | GTATGCGGAACTTCTCCGTGAGACACAACCTGACCAGACATCTACGTAC |
| | | | GCACACCGGAGAGAAGCCATTCCAATGCCGAATATGCATGCGCAACTTC |
| | | | AGTGACCACAGCAACCTGAGCAGACACCTAAAAACCCACACCGGTTCCC |
| | | | AGAAGCCATTTCAGTGTCGGATCTGTATGCGGAACTTCTCCCAGCGCAG |
| | | | CAGCCTGGTGAGACATCTACGTACGCACACCGGAGAGAAGCCATTCCAA |
| | | | TGCCGAATATGCATGCGCAACTTCAGTGAGAGCGGCCACCTGAAGAGAC |
| | | | ACCTGCGTACGCACCTGAGGGATGAGTTTCCCACCATGGTGTTTCCTTC |
| | | | TGGGCAGATCAGCCAGGCCTCGGCCTTGGCCCCGGCCCCTCCCCAAGTC |
| | | | CTGCCCCAGGCTCCAGCCCCTGCCCCTGCTCCAGCCATGGTATCAGCTC |
| | | | TGGCCCAGGCCCCAGCCCCTGTCCCAGTCCTAGCCCCAGGCCCTCCTCA |
| | | | GGCTGTGGCCCCACCTGCCCCCAAGCCCACCCAGGCTGGGGAAGGAACG |
| | | | CTGTCAGAGGCCCTGCTGCAGCTGCAGTTTGATGATGAAGACCTGGGGG |
| | | | CCTTGCTTGGCAACAGCACAGACCCAGCTGTGTTCACAGACCTGGCATC |
| | | | CGTCGACAACTCCGAGTTTCAGCAGCTGCTGAACCAGGGCATACCTGTG |
| | | | GCCCCCCACACAACTGAGCCCATGCTGATGGAGTACCCTGAGGCTATAA |
| | | | CTCGCCTAGTGACAGGGGCCCAGAGGCCCCCCGACCCAGCTCCTGCTCC |
| | | | ACTGGGGGCCCCGGGGCTCCCCAATGGCCTCCTTTCAGGAGATGAAGAC |
| | | | TTCTCCTCCATTGCGGACATGGACTTCTCAGCCCTGCTGAGTCAGATCA |
| | | | GCTCCAGTGGGCAGGGAGGAGGTGGAAGCGGCTTCAGCGTGGACACCAG |
| | | | TGCCCTGCTGGACCTGTTCAGCCCCTCGGTGACCGTGCCCGACATGAGC |
| | | | CTGCCTGACCTTGACAGCAGCCTGGCCAGTATCCAAGAGCTCCTGTCTC |
| | | | CCCAGGAGCCCCCCAGGCCTCCCGAGGCAGAGAACAGCAGCCCGGATTC |
| | | | AGGGAAGCAGCTGGTGCACTACACAGCGCAGCCGCTGTTCCTGCTGGAC |
| | | | CCCGGCTCCGTGGACACCGGGAGCAACGACCTGCCGGTGCTGTTTGAGC |
| | | | TGGGAGAGGGCTCCTACTTCTCCGAAGGGGACGGCTTCGCCGAGGACCC |
| | | | CACCATCTCCCTGCTGACAGGCTCGGAGCCTCCCAAAGCCAAGGACCCC |
| | | | ACTGTCTCC |
| pDP1 | α-ALPPL2 | 164 | ATGGCGTTGCCTGTCACGGCACTGCTCCTTCCCCTTGCACTTCTTCTTC |
| 346 | HingeNotch | | ATGCAGCTCGCCCCGAGCAGAAATTGATCTCCGAAGAAGACCTTCAGGT |
| | ZF10 p65 GR1 | | CCAACTGCAGCAATCAGGTGGAGGACTTGTGAAACCAGGAGGGAGTCTG |
| | | | AGGCTTAGCTGCGCAGCGAGTGGGTTTACTTTCTCTAGTTACGCCATGC |
| | | | ACTGGGTGCGCCAAGCCCCCGGGAAAGGACTGGAGTGGGTCGCTGTTAT |
| | | | TTCATATGACGGGTCAAATAAATACTACGCCGATTCAGTAAAGGGTCGA |
| | | | TTTACTATATCTAGGGACAACAGTAAGAACACACTTTATCTGCAGATGG |
| | | | ATAGCCTGCGGGCGGAGGACACTGCAGTCTACTATTGCGCGAAGGAAGG |
| | | | AGACAGCTCACGCTGGAGCTACGACCTCTGGGGAAGGGGGACTCTCGTA |
| | | | ACGGTGTCATCCGGCGGTGGCGGCAGCGGTGGTGGTGGATCAGGGGGAG |
| | | | GGGGGTCTCAGTCAGCACTCACCCAACCCGCATCCGTGTCTGGTAGTCC |
| | | | GGGCCAGAGTATTACTATCTCCTGTACTGGGACATCCTCCGACGTTGGG |
| | | | GGCTATAACTACGTCAGCTGGTATCAACAGCACCCTGGTAAGGCACCCA |
| | | | AGGTAATGATCTATGATGTGACAAACAGACCCAGCGGTGTTTCTAACCG |
| | | | ATTTAGCGGTTCAAAATCAGGTAACACCGCAAGCCTTACCATATCTGGT |
| | | | CTCCAGGCTGAAGACGAAGCCGACTATTACTGCAGCAGCTATACCATAG |
| | | | CCTCTACACTGGTTGTCTTCGGAGGAGGCACTAAGCTGACTGTGCTAAC |
| | | | CACGACGCCAGCGCCGCGACCACCAACACCGGCGCCCACCATCGCGTCG |
| | | | CAGCCCCTGTCCCTGCGCCCAGAGGCGTGCTTTATGTACGTGGCAGCCG |
| | | | CGGCATTTGTACTTCTGTTTTTCGTGGGGTGCGGTGTGCTTCTCAGCAA |
| | | | GAGGAAACGGAAGCACcccaagaaaaagaggaaggtgTCTAGACCCGGA |
| | | | GAGCGCCCATTCCAGTGTCGGATTTGCATGCGGAACTTTTCGAGAAGAC |
| | | | ACGGCCTGGACAGACATACCCGTACTCATACAGGTGAAAAACCCTTTCA |
| | | | GTGTCGGATCTGTATGCGAAATTTCTCCGACCACAGCAGCCTGAAGAGA |
| | | | CATCTACGTACCCACACCGGCAGCCAGAAGCCATTTCAGTGTCGGATCT |
| | | | GTATGCGGAACTTCTCCGTGAGACACAACCTGACCAGACATCTACGTAC |
| | | | GCACACCGGAGAGAAGCCATTCCAATGCCGAATATGCATGCGCAACTTC |
| | | | AGTGACCACAGCAACCTGAGCAGACACCTAAAAACCCACACCGGTTCCC |
| | | | AGAAGCCATTTCAGTGTCGGATCTGTATGCGGAACTTCTCCCAGCGCAG |
| | | | CAGCCTGGTGAGACATCTACGTACGCACACCGGAGAGAAGCCATTCCAA |
| | | | TGCCGAATATGCATGCGCAACTTCAGTGAGAGCGGCCACCTGAAGAGAC |
| | | | ACCTGCGTACGCACCTGAGGGATGAGTTTCCCACCATGGTGTTTCCTTC |
| | | | TGGGCAGATCAGCCAGGCCTCGGCCTTGGCCCCGGCCCCTCCCCAAGTC |
| | | | CTGCCCCAGGCTCCAGCCCCTGCCCCTGCTCCAGCCATGGTATCAGCTC |
| | | | TGGCCCAGGCCCCAGCCCCTGTCCCAGTCCTAGCCCCAGGCCCTCCTCA |
| | | | GGCTGTGGCCCCACCTGCCCCCAAGCCCACCCAGGCTGGGGAAGGAACG |
| | | | CTGTCAGAGGCCCTGCTGCAGCTGCAGTTTGATGATGAAGACCTGGGGG |
| | | | CCTTGCTTGGCAACAGCACAGACCCAGCTGTGTTCACAGACCTGGCATC |
| | | | CGTCGACAACTCCGAGTTTCAGCAGCTGCTGAACCAGGGCATACCTGTG |
| | | | GCCCCCCACACAACTGAGCCCATGCTGATGGAGTACCCTGAGGCTATAA |
| | | | CTCGCCTAGTGACAGGGGCCCAGAGGCCCCCCGACCCAGCTCCTGCTCC |
| | | | ACTGGGGGCCCCGGGGCTCCCCAATGGCCTCCTTTCAGGAGATGAAGAC |
| | | | TTCTCCTCCATTGCGGACATGGACTTCTCAGCCCTGCTGAGTCAGATCA |
| | | | GCTCCAGTGGGCAGGGAGGAGGTGGAAGCGACCAAAGCACCTTTGACAT |
| | | | TTTGCAGGATTTGGAGTTTTCTTCTGGGTCCCCAGGTAAAGAGACGAAT |
| | | | GAGAGTCCTTGGAGATCAGACCTGTTGATAGATGAAAACTGTTTGCTTT |
| | | | CTCCTCTGGCGGGAGAAGACGATTCATTCCTTTTGGAAGGAAACTCGAA |
| | | | TGAGGAC |
| pDP1 | α-ALPPL2 | 165 | ATGGCGTTGCCTGTCACGGCACTGCTCCTTCCCCTTGCACTTCTTCTTC |
| 347 | HingeNotch | | ATGCAGCTCGCCCCGAGCAGAAATTGATCTCCGAAGAAGACCTTCAGGT |
| | ZF10 p65 | | CCAACTGCAGCAATCAGGTGGAGGACTTGTGAAACCAGGAGGGAGTCTG |
| | NotchlNLS | | AGGCTTAGCTGCGCAGCGAGTGGGTTTACTTTCTCTAGTTACGCCATGC |
| | | | ACTGGGTGCGCCAAGCCCCCGGGAAAGGACTGGAGTGGGTCGCTGTTAT |
| | | | TTCATATGACGGGTCAAATAAATACTACGCCGATTCAGTAAAGGGTCGA |
| | | | TTTACTATATCTAGGGACAACAGTAAGAACACACTTTATCTGCAGATGG |
| | | | ATAGCCTGCGGGCGGAGGACACTGCAGTCTACTATTGCGCGAAGGAAGG |
| | | | AGACAGCTCACGCTGGAGCTACGACCTCTGGGGAAGGGGGACTCTCGTA |
| | | | ACGGTGTCATCCGGCGGTGGCGGCAGCGGTGGTGGTGGATCAGGGGGAG |
| | | | GGGGGTCTCAGTCAGCACTCACCCAACCCGCATCCGTGTCTGGTAGTCC |
| | | | GGGCCAGAGTATTACTATCTCCTGTACTGGGACATCCTCCGACGTTGGG |
| | | | GGCTATAACTACGTCAGCTGGTATCAACAGCACCCTGGTAAGGCACCCA |
| | | | AGGTAATGATCTATGATGTGACAAACAGACCCAGCGGTGTTTCTAACCG |
| | | | ATTTAGCGGTTCAAAATCAGGTAACACCGCAAGCCTTACCATATCTGGT |
| | | | CTCCAGGCTGAAGACGAAGCCGACTATTACTGCAGCAGCTATACCATAG |
| | | | CCTCTACACTGGTTGTCTTCGGAGGAGGCACTAAGCTGACTGTGCTAAC |
| | | | CACGACGCCAGCGCCGCGACCACCAACACCGGCGCCCACCATCGCGTCG |
| | | | CAGCCCCTGTCCCTGCGCCCAGAGGCGTGCTTTATGTACGTGGCAGCCG |
| | | | CGGCATTTGTACTTCTGTTTTTCGTGGGGTGCGGTGTGCTTCTCAGCAA |
| | | | GAGGAAACGGAAGCACcggaggaagaagTCTAGACCCGGAGAGCGCCCA |
| | | | TTCCAGTGTCGGATTTGCATGCGGAACTTTTCGAGAAGACACGGCCTGG |
| | | | ACAGACATACCCGTACTCATACAGGTGAAAAACCCTTTCAGTGTCGGAT |
| | | | CTGTATGCGAAATTTCTCCGACCACAGCAGCCTGAAGAGACATCTACGT |
| | | | ACCCACACCGGCAGCCAGAAGCCATTTCAGTGTCGGATCTGTATGCGGA |
| | | | ACTTCTCCGTGAGACACAACCTGACCAGACATCTACGTACGCACACCGG |
| | | | AGAGAAGCCATTCCAATGCCGAATATGCATGCGCAACTTCAGTGACCAC |
| | | | AGCAACCTGAGCAGACACCTAAAAACCCACACCGGTTCCCAGAAGCCAT |
| | | | TTCAGTGTCGGATCTGTATGCGGAACTTCTCCCAGCGCAGCAGCCTGGT |
| | | | GAGACATCTACGTACGCACACCGGAGAGAAGCCATTCCAATGCCGAATA |
| | | | TGCATGCGCAACTTCAGTGAGAGCGGCCACCTGAAGAGACACCTGCGTA |
| | | | CGCACCTGAGGGATGAGTTTCCCACCATGGTGTTTCCTTCTGGGCAGAT |
| | | | CAGCCAGGCCTCGGCCTTGGCCCCGGCCCCTCCCCAAGTCCTGCCCCAG |
| | | | GCTCCAGCCCCTGCCCCTGCTCCAGCCATGGTATCAGCTCTGGCCCAGG |
| | | | CCCCAGCCCCTGTCCCAGTCCTAGCCCCAGGCCCTCCTCAGGCTGTGGC |
| | | | CCCACCTGCCCCCAAGCCCACCCAGGCTGGGGAAGGAACGCTGTCAGAG |
| | | | GCCCTGCTGCAGCTGCAGTTTGATGATGAAGACCTGGGGGCCTTGCTTG |
| | | | GCAACAGCACAGACCCAGCTGTGTTCACAGACCTGGCATCCGTCGACAA |
| | | | CTCCGAGTTTCAGCAGCTGCTGAACCAGGGCATACCTGTGGCCCCCCAC |
| | | | ACAACTGAGCCCATGCTGATGGAGTACCCTGAGGCTATAACTCGCCTAG |
| | | | TGACAGGGGCCCAGAGGCCCCCCGACCCAGCTCCTGCTCCACTGGGGGC |
| | | | CCCGGGGCTCCCCAATGGCCTCCTTTCAGGAGATGAAGACTTCTCCTCC |
| | | | ATTGCGGACATGGACTTCTCAGCCCTGCTGAGTCAGATCAGCTCC |
| pDP1 | α-ALPPL2 | 166 | ATGGCGTTGCCTGTCACGGCACTGCTCCTTCCCCTTGCACTTCTTCTTC |
| 348 | HingeNotch | | ATGCAGCTCGCCCCGAGCAGAAATTGATCTCCGAAGAAGACCTTCAGGT |
| | ZF10 p65 | | CCAACTGCAGCAATCAGGTGGAGGACTTGTGAAACCAGGAGGGAGTCTG |
| | HSF1 | | AGGCTTAGCTGCGCAGCGAGTGGGTTTACTTTCTCTAGTTACGCCATGC |
| | NotchlNLS | | ACTGGGTGCGCCAAGCCCCCGGGAAAGGACTGGAGTGGGTCGCTGTTAT |
| | | | TTCATATGACGGGTCAAATAAATACTACGCCGATTCAGTAAAGGGTCGA |
| | | | TTTACTATATCTAGGGACAACAGTAAGAACACACTTTATCTGCAGATGG |
| | | | ATAGCCTGCGGGCGGAGGACACTGCAGTCTACTATTGCGCGAAGGAAGG |
| | | | AGACAGCTCACGCTGGAGCTACGACCTCTGGGGAAGGGGGACTCTCGTA |
| | | | ACGGTGTCATCCGGCGGTGGCGGCAGCGGTGGTGGTGGATCAGGGGGAG |
| | | | GGGGGTCTCAGTCAGCACTCACCCAACCCGCATCCGTGTCTGGTAGTCC |
| | | | GGGCCAGAGTATTACTATCTCCTGTACTGGGACATCCTCCGACGTTGGG |
| | | | GGCTATAACTACGTCAGCTGGTATCAACAGCACCCTGGTAAGGCACCCA |
| | | | AGGTAATGATCTATGATGTGACAAACAGACCCAGCGGTGTTTCTAACCG |
| | | | ATTTAGCGGTTCAAAATCAGGTAACACCGCAAGCCTTACCATATCTGGT |
| | | | CTCCAGGCTGAAGACGAAGCCGACTATTACTGCAGCAGCTATACCATAG |
| | | | CCTCTACACTGGTTGTCTTCGGAGGAGGCACTAAGCTGACTGTGCTAAC |
| | | | CACGACGCCAGCGCCGCGACCACCAACACCGGCGCCCACCATCGCGTCG |
| | | | CAGCCCCTGTCCCTGCGCCCAGAGGCGTGCTTTATGTACGTGGCAGCCG |
| | | | CGGCATTTGTACTTCTGTTTTTCGTGGGGTGCGGTGTGCTTCTCAGCAA |
| | | | GAGGAAACGGAAGCACcggaggaagaagTCTAGACCCGGAGAGCGCCCA |
| | | | TTCCAGTGTCGGATTTGCATGCGGAACTTTTCGAGAAGACACGGCCTGG |
| | | | ACAGACATACCCGTACTCATACAGGTGAAAAACCCTTTCAGTGTCGGAT |
| | | | CTGTATGCGAAATTTCTCCGACCACAGCAGCCTGAAGAGACATCTACGT |
| | | | ACCCACACCGGCAGCCAGAAGCCATTTCAGTGTCGGATCTGTATGCGGA |
| | | | ACTTCTCCGTGAGACACAACCTGACCAGACATCTACGTACGCACACCGG |
| | | | AGAGAAGCCATTCCAATGCCGAATATGCATGCGCAACTTCAGTGACCAC |
| | | | AGCAACCTGAGCAGACACCTAAAAACCCACACCGGTTCCCAGAAGCCAT |
| | | | TTCAGTGTCGGATCTGTATGCGGAACTTCTCCCAGCGCAGCAGCCTGGT |
| | | | GAGACATCTACGTACGCACACCGGAGAGAAGCCATTCCAATGCCGAATA |
| | | | TGCATGCGCAACTTCAGTGAGAGCGGCCACCTGAAGAGACACCTGCGTA |
| | | | CGCACCTGAGGGATGAGTTTCCCACCATGGTGTTTCCTTCTGGGCAGAT |
| | | | CAGCCAGGCCTCGGCCTTGGCCCCGGCCCCTCCCCAAGTCCTGCCCCAG |
| | | | GCTCCAGCCCCTGCCCCTGCTCCAGCCATGGTATCAGCTCTGGCCCAGG |
| | | | CCCCAGCCCCTGTCCCAGTCCTAGCCCCAGGCCCTCCTCAGGCTGTGGC |
| | | | CCCACCTGCCCCCAAGCCCACCCAGGCTGGGGAAGGAACGCTGTCAGAG |
| | | | GCCCTGCTGCAGCTGCAGTTTGATGATGAAGACCTGGGGGCCTTGCTTG |
| | | | GCAACAGCACAGACCCAGCTGTGTTCACAGACCTGGCATCCGTCGACAA |
| | | | CTCCGAGTTTCAGCAGCTGCTGAACCAGGGCATACCTGTGGCCCCCCAC |
| | | | ACAACTGAGCCCATGCTGATGGAGTACCCTGAGGCTATAACTCGCCTAG |
| | | | TGACAGGGGCCCAGAGGCCCCCCGACCCAGCTCCTGCTCCACTGGGGGC |
| | | | CCCGGGGCTCCCCAATGGCCTCCTTTCAGGAGATGAAGACTTCTCCTCC |
| | | | ATTGCGGACATGGACTTCTCAGCCCTGCTGAGTCAGATCAGCTCCAGTG |
| | | | GGCAGGGAGGAGGTGGAAGCGGCTTCAGCGTGGACACCAGTGCCCTGCT |
| | | | GGACCTGTTCAGCCCCTCGGTGACCGTGCCCGACATGAGCCTGCCTGAC |
| | | | CTTGACAGCAGCCTGGCCAGTATCCAAGAGCTCCTGTCTCCCCAGGAGC |
| | | | CCCCCAGGCCTCCCGAGGCAGAGAACAGCAGCCCGGATTCAGGGAAGCA |
| | | | GCTGGTGCACTACACAGCGCAGCCGCTGTTCCTGCTGGACCCCGGCTCC |
| | | | GTGGACACCGGGAGCAACGACCTGCCGGTGCTGTTTGAGCTGGGAGAGG |
| | | | GCTCCTACTTCTCCGAAGGGGACGGCTTCGCCGAGGACCCCACCATCTC |
| | | | CCTGCTGACAGGCTCGGAGCCTCCCAAAGCCAAGGACCCCACTGTCTCC |
| pDP1 | α-ALPPL2 | 167 | ATGGCGTTGCCTGTCACGGCACTGCTCCTTCCCCTTGCACTTCTTCTTC |
| 349 | HingeNotch | | ATGCAGCTCGCCCCGAGCAGAAATTGATCTCCGAAGAAGACCTTCAGGT |
| | ZF10 p65 GR1 | | CCAACTGCAGCAATCAGGTGGAGGACTTGTGAAACCAGGAGGGAGTCTG |
| | Notch1NLS | | AGGCTTAGCTGCGCAGCGAGTGGGTTTACTTTCTCTAGTTACGCCATGC |
| | | | ACTGGGTGCGCCAAGCCCCCGGGAAAGGACTGGAGTGGGTCGCTGTTAT |
| | | | TTCATATGACGGGTCAAATAAATACTACGCCGATTCAGTAAAGGGTCGA |
| | | | TTTACTATATCTAGGGACAACAGTAAGAACACACTTTATCTGCAGATGG |
| | | | ATAGCCTGCGGGCGGAGGACACTGCAGTCTACTATTGCGCGAAGGAAGG |
| | | | AGACAGCTCACGCTGGAGCTACGACCTCTGGGGAAGGGGGACTCTCGTA |
| | | | ACGGTGTCATCCGGCGGTGGCGGCAGCGGTGGTGGTGGATCAGGGGGAG |
| | | | GGGGGTCTCAGTCAGCACTCACCCAACCCGCATCCGTGTCTGGTAGTCC |
| | | | GGGCCAGAGTATTACTATCTCCTGTACTGGGACATCCTCCGACGTTGGG |
| | | | GGCTATAACTACGTCAGCTGGTATCAACAGCACCCTGGTAAGGCACCCA |
| | | | AGGTAATGATCTATGATGTGACAAACAGACCCAGCGGTGTTTCTAACCG |
| | | | ATTTAGCGGTTCAAAATCAGGTAACACCGCAAGCCTTACCATATCTGGT |
| | | | CTCCAGGCTGAAGACGAAGCCGACTATTACTGCAGCAGCTATACCATAG |
| | | | CCTCTACACTGGTTGTCTTCGGAGGAGGCACTAAGCTGACTGTGCTAAC |
| | | | CACGACGCCAGCGCCGCGACCACCAACACCGGCGCCCACCATCGCGTCG |
| | | | CAGCCCCTGTCCCTGCGCCCAGAGGCGTGCTTTATGTACGTGGCAGCCG |
| | | | CGGCATTTGTACTTCTGTTTTTCGTGGGGTGCGGTGTGCTTCTCAGCAA |
| | | | GAGGAAACGGAAGCACcggaggaagaagTCTAGACCCGGAGAGCGCCCA |
| | | | TTCCAGTGTCGGATTTGCATGCGGAACTTTTCGAGAAGACACGGCCTGG |
| | | | ACAGACATACCCGTACTCATACAGGTGAAAAACCCTTTCAGTGTCGGAT |
| | | | CTGTATGCGAAATTTCTCCGACCACAGCAGCCTGAAGAGACATCTACGT |
| | | | ACCCACACCGGCAGCCAGAAGCCATTTCAGTGTCGGATCTGTATGCGGA |
| | | | ACTTCTCCGTGAGACACAACCTGACCAGACATCTACGTACGCACACCGG |
| | | | AGAGAAGCCATTCCAATGCCGAATATGCATGCGCAACTTCAGTGACCAC |
| | | | AGCAACCTGAGCAGACACCTAAAAACCCACACCGGTTCCCAGAAGCCAT |
| | | | TTCAGTGTCGGATCTGTATGCGGAACTTCTCCCAGCGCAGCAGCCTGGT |
| | | | GAGACATCTACGTACGCACACCGGAGAGAAGCCATTCCAATGCCGAATA |
| | | | TGCATGCGCAACTTCAGTGAGAGCGGCCACCTGAAGAGACACCTGCGTA |
| | | | CGCACCTGAGGGATGAGTTTCCCACCATGGTGTTTCCTTCTGGGCAGAT |
| | | | CAGCCAGGCCTCGGCCTTGGCCCCGGCCCCTCCCCAAGTCCTGCCCCAG |
| | | | GCTCCAGCCCCTGCCCCTGCTCCAGCCATGGTATCAGCTCTGGCCCAGG |
| | | | CCCCAGCCCCTGTCCCAGTCCTAGCCCCAGGCCCTCCTCAGGCTGTGGC |
| | | | CCCACCTGCCCCCAAGCCCACCCAGGCTGGGGAAGGAACGCTGTCAGAG |
| | | | GCCCTGCTGCAGCTGCAGTTTGATGATGAAGACCTGGGGGCCTTGCTTG |
| | | | GCAACAGCACAGACCCAGCTGTGTTCACAGACCTGGCATCCGTCGACAA |
| | | | CTCCGAGTTTCAGCAGCTGCTGAACCAGGGCATACCTGTGGCCCCCCAC |
| | | | ACAACTGAGCCCATGCTGATGGAGTACCCTGAGGCTATAACTCGCCTAG |
| | | | TGACAGGGGCCCAGAGGCCCCCCGACCCAGCTCCTGCTCCACTGGGGGC |
| | | | CCCGGGGCTCCCCAATGGCCTCCTTTCAGGAGATGAAGACTTCTCCTCC |
| | | | ATTGCGGACATGGACTTCTCAGCCCTGCTGAGTCAGATCAGCTCCAGTG |
| | | | GGCAGGGAGGAGGTGGAAGCGACCAAAGCACCTTTGACATTTTGCAGGA |
| | | | TTTGGAGTTTTCTTCTGGGTCCCCAGGTAAAGAGACGAATGAGAGTCCT |
| | | | TGGAGATCAGACCTGTTGATAGATGAAAACTGTTTGCTTTCTCCTCTGG |
| | | | CGGGAGAAGACGATTCATTCCTTTTGGAAGGAAACTCGAATGAGGAC |

[0252] In these experiments, primary human CD8+ T-cells bearing α-ALPPL2 HingeNotch receptors containing (i) ZF6 or ZF10 DNA binding domains, (ii) SV40 or Notch1 NLS sequences, and (iii) p65, p65-HSF1, or p65-GR TADs were co-incubated with K562 target cells for 72 hours. All T-cells were co-transduced with a cognate zinc finger-responsive promoter driving expression of an α-MCAM CAR. K562s were either unmodified (MCAM+), transduced with ALPPL2 (MCAM+/ALPPL2+), or transduced with ALPPL2 and rendered deficient in MCAM expression via CRISPR knockout (ALPPL2+). As shown in FIG. 11, the ZF6 and ZF10-based receptor-driven CARs were able to specifically kill MCAM+/ALPPL2+K562 cells when incorporating the augmented p65-GR1 or p65-HSF1 TADs. Notably, the ALPPL2 bar (the dark black bar in the middle of the three) for construct pDP1343 is lower than expected, near the level of MCAM/ALPPL2 (the hatched bar). It is noted that this is likely due to a technical error, e.g., pipetting error, and thus could be considered an outlier.

### Example 14

### General Experimental Procedures

### Design of Receptor and Response Element Construct

[0253] Receptors were built by fusing the CD19 scFv to the corresponding SynTF obtained from the Khalil laboratory. All receptors contain an N-terminal CD8α signal peptide (MALPVTALLLPLALLLHAARP; SEQ ID NO: 72) for membrane targeting and a myc-tag (EQKLISEEDL; SEQ ID NO: 73) to facilitate determination of surface expression with α-myc A647 (Cell-Signaling #2233). The receptors were then cloned into a modified pHR′ SIN:CSW vector containing a phosphoglycerate kinase (PGK) promoter.

[0254] The pHR′ SIN:CSW vector was also modified to make the response element plasmids. Eight copies of the ZFA target sequence 3 ZF3 (aGACGTCGAAGTAGCCGTAg; SEQ ID NO: 63), ZFA target sequence ZF6 (gGACGACGCGGTCTAAGAAg; SEQ ID NO: 66), or ZFA target sequence ZF10 (cGGCGTAGCCGATGTCGCGc; SEQ ID NO: 70) DNA binding domain target sequence were cloned 5′ to a minimal ybTATA promoter driving a tagBFP gene. Also included in the response element plasmids was a PGK promoter that constitutively drives mCitrine expression to suitably identify transduced T cells. For all inducible BFP vectors, BFP was cloned via a BamHI site in the multiple cloning site 3′ to the ybTATA promoter. For evaluation of target-specific killing performance, the reporter construct was modified as follows. The constitutively-expressed mCitrine was replaced with BFP, while the inducible BFP was replaced with an anti-MCAM CAR (M1). For ALPPL2 targeting, the synZTE-containing HingeNotch receptor constructs were modified to replace the scFv with the appropriate ALPPL2-specific scFv variant M25FYIA. All constructs were cloned via Gibson HiFi assembly (NEB #E2621L).

### Isolation and Culture of Primary Human T Cells

[0255] Primary CD4+ or CD8+ T cells were isolated from anonymous donor blood after apheresis by negative selection (STEMCELL Technologies #15062 & 15063). Blood was obtained from Blood Centers of the Pacific (San Francisco, Calif.) as approved by the University Institutional Review Board. T cells were cryopreserved in RPMI-1640 (UCSF cell culture core) with 20% human AB serum (Valley Biomedical Inc., #HP1022) and 10% DMSO. After thawing, T cells were cultured in human T cell medium consisting of X-VIVO 15 (Lonza #04-418Q), 5% Human AB serum and 10 mM neutralized N-acetyl L-Cysteine (Sigma-Aldrich #A9165) supplemented with 30 units/mL IL-2 (NCI BRB Preclinical Repository) for all experiments.

### Lentiviral Transduction of Human T Cells

[0256] Pantropic VSV-G pseudotyped lentivirus was produced via transfection of Lenti-X 293T cells (Clontech #11131D) with a transgene expression vector constructed as described above and the viral packaging plasmids pCMVdR8.91 and pMD2.G using Mirus TransIT-Lenti (Mirus #MIR 6606). Primary T cells were thawed the same day, and after 24 hours in culture, were stimulated with Human T-Activator CD3/CD28 Dynabeads (Life Technologies #11131D) at a cell:bead ratio of 1:3. At 48 hours, viral supernatant was harvested and the primary T cells were exposed to the virus for 24 hours. At day 5 post T cell stimulation, the Dynabeads were removed, and the T cells expanded until day 10 when they were rested and could be used in assays. T cells were sorted for assays with a Beckton Dickinson (BD) FACs ARIA II.

### Generation of Reporter Jurkat T Cells for TMD/STS Screen

[0257] E6-1 Jurkat T cells (ATCC #TIB-152) were lentivirally transduced with a reporter plasmid with inducible BFP and constitutive mCitrine, as described previously (Roybal et al. 2016, supra). Reporter-positive Jurkat cells were sorted for mCitrine expression using a Beckton Dickinson (BD) FACs ARIA II and expanded. Lentivirus was produced with the receptor transgene expression vector as described previously. Reporter-positive Jurkat cells were transduced with receptor and expanded for experimentation in 96 well plates.

### Cancer Cell Lines

[0258] The target cell lines for all experiments were K562 myelogenous leukemia cells (ATCC #CCL-243). K562^{CD19+} were generated via lentiviral transduction to stably express human CD19 at equivalent levels as Daudi tumors. CD19 levels were determined by staining the cells with anti-CD19 APC (Biolegend #302212).

[0259] For ALPPL2 targeting, the K562 cells were transduced with a lentivirus expressing the ALPPL2 transgene (NP_112603.2) in a modified pHR′ SIN:CSW vector containing a silencing-prone spleen focus forming virus (SFFV) promoter to generate K562 MCAM+/ALPPL2+. To generate the K562 ALPPL2+ cell line, K562 MCAM+/ALPPL2+ were subjected to CRISPR knockout at the MCAM locus using the gRNA sequence AGGCGCAGCTCCCGGGCTGG (SEQ ID NO: 190), which was cloned into the pL-CRISPR.EFS.GFP vector, a gift from Benjamin Ebert (Addgene plasmid #57818). These constructs were cloned via In-Fusion cloning (Takara Bio).

### In Vitro Stimulation of Primary T Cells

[0260] For all in vitro T cell stimulations, 1×10⁵ T cells were co-cultured with sender cells at a 1:1 ratio in round bottom 96-well tissue culture plates. The cultures were analyzed at 48 hours for reporter activation with a BD Fortessa X-50. All flow cytometry analysis was performed in FlowJo software (TreeStar).

### In Vitro Stimulation of Jurkat T Cells

[0261] For all in vitro Jurkat T cell stimulations, 1×10⁵ Jurkat T cells were co-cultured with sender cells at a 1:1 ratio in round bottom 96-well tissue culture plates. The cultures were analyzed at 48 hours for reporter activation with a BD Fortessa X-50. All flow cytometry analysis was performed in FlowJo software (TreeStar).

[0262] While particular alternatives of the present disclosure have been disclosed, it is to be understood that various modifications and combinations are possible and are contemplated within the true spirit and scope of the appended claims. There is no intention, therefore, of limitations to the exact abstract and disclosure herein presented.

### REFERENCES

[0263] Dudani J. S., Warren A. D., and Bhatia S. N., Harnessing Protease Activity to Improve Cancer Care. Annu. Rev. Cancer Biol. 2018. 2:353-76.
[0264] David L. Porter, M. D., Bruce L. Levine, Ph.D., Michael Kalos, Ph.D., Adam Bagg, M. D., and Carl H. June, M.D. Chimeric Antigen Receptor-Modified T Cells in Chronic Lymphoid Leukemia. N. Engl J Med. 2011 Aug. 25; 365(8):725-33.
[0265] Gordon W R et al., The molecular logic of Notch signaling—a structural and biochemical perspective. J. Cell Sci. (2008) 121:3109-19.
[0266] Gordon W R et al., Mechanical Allostery: Evidence for a Force Requirement in the Proteolytic Activation of Notch. Dev Cell (2015) 33:729-36.
[0267] Morsut L, Roybal K T, Xiong X, Gordley R M, Coyle S M, Thomson M, and Lim W A. Engineering Customized Cell Sensing and Response Behaviors Using Synthetic Notch Receptors. Cell. 2016 Feb. 11; 164(4):780-91.
[0268] Naso M F, Tomkowicz B, Perry W L 3rd, Strohl W R. Adeno-Associated Virus (AAV) as a Vector for Gene Therapy. BioDrugs. 2017; 31(4):317-34.
[0269] Nasri M, Karimi A, Allahbakhshian Farsani M. Production, purification and titration of a lentivirus-based vector for gene delivery purposes. Cytotechnology. 2014; 66(6):1031-38.
[0270] Roybal K T, Jasper Z. Williams, Leonardo Morsut, Levi J. Rupp, Isabel Kolinko, Joseph H. Choe, Whitney J. Walker, Krista A. McNally, and Wendell A. Lim. Engineering T cells with Customized Therapeutic Response Programs Using Synthetic Notch Receptors. Cell. 2016 Oct. 6; 167(2):419-32.
[0271] Samulski and Muzyczka (2014). AAV-Mediated Gene Therapy for Research and Therapeutic Purposes. Annu. Rev. Virol. 1:427.
[0272] Sakuma, et al. (2012). Lentiviral vectors: basic to translational. Biochem. J. 443:603.
[0273] Watson D. J., Wolfe J. H. Viral vectors for gene therapy: methods and protocols. Totowa, N.J., USA: Humana Press; 2003. pp. 383-404.
[0274] Vidarsson G. et al., IgG subclasses and allotypes: from structure to effector functions. Frontiers Immunol. (2014) Oct. 20; 5:520.
[0275] F. An, D. C. Drummond, S. Wilson, D. B. Kirpotin, S. L. Nishimura, V. C. Broaddus, B. Liu, Targeted drug delivery to mesothelioma cells using functionally selected internalizing human single-chain antibodies, Mol. Cancer Ther. 7, 569-578 (2008).
[0276] Y. Su, X. Zhang, S. Bidlingmaier, C. R. Behrens, N.-K. Lee, B. Liu, ALPPL2 Is a Highly Specific and Targetable Tumor Cell Surface Antigen, Cancer Res. 80, 4552-4564 (2020).

The application's sequence listing, which the Patent Office published only in electronic form, follows.

SEQUENCE LISTING (190 sequences)

SEQ ID NO: 1 - protein, 731 aa, Artificial Sequence
  Synthetic construct
MALPVTALLLPLALLLHAARPEQKLISEEDLDIQMTQTTSSLSASLGDRVTISCRASQDISKYLNWYQQKPDGTVKLLIYHTSRLHSGVPSRFSGSGSGTDYSLTISNLEQEDIATYFCQQGNTLPYTFGGGTKLEITGGGGSGGGGSGGGGSEVKLQESGPGLVAPSQSLSVTCTVSGVSLPDYGVSWIRQPPRKGLEWLGVIWGSETTYYNSALKSRLTIIKDNSKSQVFLKMNSLQTDDTAIYYCAKHYYYGGSYAMDYWGQGTSVTVSSILDYSFGGGAGRDIPPPLIEETVEPPPPAQLHFMYVAAAAFVLLFFVGCGVLLSRKRRRMAPKKKRKVGIHGVPGGLEGGGGSGGTASSRPGERPFQCRICMRNFSQRSSLVRHTRTHTGEKPFQCRICMRNFSDKSVLARHLRTHTGSQKPFQCRICMRNFSQRSSLVRHTRTHTGEKPFQCRICMRNFSQRNNLGRHLRTHTGSQKPFQCRICMRNFSTHAVLTRHTRTHTGEKPFQCRICMRNFSDRGNLTRHLRTHLRGSTCRDEFPTMVFPSGQISQASALAPAPPQVLPQAPAPAPAPAMVSALAQAPAPVPVLAPGPPQAVAPPAPKPTQAGEGTLSEALLQLQFDDEDLGALLGNSTDPAVFTDLASVDNSEFQQLLNQGIPVAPHTTEPMLMEYPEAITRLVTGAQRPPDPAPAPLGAPGLPNGLLSGDEDFSSIADMDFSALLSQISS

SEQ ID NO: 2 - protein, 732 aa, Artificial Sequence
  Synthetic construct
MALPVTALLLPLALLLHAARPEQKLISEEDLDIQMTQTTSSLSASLGDRVTISCRASQDISKYLNWYQQKPDGTVKLLIYHTSRLHSGVPSRFSGSGSGTDYSLTISNLEQEDIATYFCQQGNTLPYTFGGGTKLEITGGGGSGGGGSGGGGSEVKLQESGPGLVAPSQSLSVTCTVSGVSLPDYGVSWIRQPPRKGLEWLGVIWGSETTYYNSALKSRLTIIKDNSKSQVFLKMNSLQTDDTAIYYCAKHYYYGGSYAMDYWGQGTSVTVSSILDYSFGGGAGRDIPPPLIEETVEPPPPAQLHFMYVAAAAFVLLFFVGCGVLLSKRKRKHMAPKKKRKVGIHGVPGGLEGGGGSGGTASSRPGERPFQCRICMRNFSQRSSLVRHTRTHTGEKPFQCRICMRNFSDKSVLARHLRTHTGSQKPFQCRICMRNFSQRSSLVRHTRTHTGEKPFQCRICMRNFSQRNNLGRHLRTHTGSQKPFQCRICMRNFSTHAVLTRHTRTHTGEKPFQCRICMRNFSDRGNLTRHLRTHLRGSTCRDEFPTMVFPSGQISQASALAPAPPQVLPQAPAPAPAPAMVSALAQAPAPVPVLAPGPPQAVAPPAPKPTQAGEGTLSEALLQLQFDDEDLGALLGNSTDPAVFTDLASVDNSEFQQLLNQGIPVAPHTTEPMLMEYPEAITRLVTGAQRPPDPAPAPLGAPGLPNGLLSGDEDFSSIADMDFSALLSQISS

SEQ ID NO: 3 - protein, 726 aa, Artificial Sequence
  Synthetic construct
MALPVTALLLPLALLLHAARPEQKLISEEDLDIQMTQTTSSLSASLGDRVTISCRASQDISKYLNWYQQKPDGTVKLLIYHTSRLHSGVPSRFSGSGSGTDYSLTISNLEQEDIATYFCQQGNTLPYTFGGGTKLEITGGGGSGGGGSGGGGSEVKLQESGPGLVAPSQSLSVTCTVSGVSLPDYGVSWIRQPPRKGLEWLGVIWGSETTYYNSALKSRLTIIKDNSKSQVFLKMNSLQTDDTAIYYCAKHYYYGGSYAMDYWGQGTSVTVSSTTTPAPRPPTPAPTIASQPLSLRPEACFMYVAAAAFVLLFFVGCGVLLSRKRRRMAPKKKRKVGIHGVPGGLEGGGGSGGTASSRPGERPFQCRICMRNFSQRSSLVRHTRTHTGEKPFQCRICMRNFSDKSVLARHLRTHTGSQKPFQCRICMRNFSQRSSLVRHTRTHTGEKPFQCRICMRNFSQRNNLGRHLRTHTGSQKPFQCRICMRNFSTHAVLTRHTRTHTGEKPFQCRICMRNFSDRGNLTRHLRTHLRGSTCRDEFPTMVFPSGQISQASALAPAPPQVLPQAPAPAPAPAMVSALAQAPAPVPVLAPGPPQAVAPPAPKPTQAGEGTLSEALLQLQFDDEDLGALLGNSTDPAVFTDLASVDNSEFQQLLNQGIPVAPHTTEPMLMEYPEAITRLVTGAQRPPDPAPAPLGAPGLPNGLLSGDEDFSSIADMDFSALLSQISS

SEQ ID NO: 4 - protein, 727 aa, Artificial Sequence
  Synthetic construct
MALPVTALLLPLALLLHAARPEQKLISEEDLDIQMTQTTSSLSASLGDRVTISCRASQDISKYLNWYQQKPDGTVKLLIYHTSRLHSGVPSRFSGSGSGTDYSLTISNLEQEDIATYFCQQGNTLPYTFGGGTKLEITGGGGSGGGGSGGGGSEVKLQESGPGLVAPSQSLSVTCTVSGVSLPDYGVSWIRQPPRKGLEWLGVIWGSETTYYNSALKSRLTIIKDNSKSQVFLKMNSLQTDDTAIYYCAKHYYYGGSYAMDYWGQGTSVTVSSTTTPAPRPPTPAPTIASQPLSLRPEACFMYVAAAAFVLLFFVGCGVLLSKRKRKHMAPKKKRKVGIHGVPGGLEGGGGSGGTASSRPGERPFQCRICMRNFSQRSSLVRHTRTHTGEKPFQCRICMRNFSDKSVLARHLRTHTGSQKPFQCRICMRNFSQRSSLVRHTRTHTGEKPFQCRICMRNFSQRNNLGRHLRTHTGSQKPFQCRICMRNFSTHAVLTRHTRTHTGEKPFQCRICMRNFSDRGNLTRHLRTHLRGSTCRDEFPTMVFPSGQISQASALAPAPPQVLPQAPAPAPAPAMVSALAQAPAPVPVLAPGPPQAVAPPAPKPTQAGEGTLSEALLQLQFDDEDLGALLGNSTDPAVFTDLASVDNSEFQQLLNQGIPVAPHTTEPMLMEYPEAITRLVTGAQRPPDPAPAPLGAPGLPNGLLSGDEDFSSIADMDFSALLSQISS

SEQ ID NO: 5 - protein, 726 aa, Artificial Sequence
  Synthetic construct
MALPVTALLLPLALLLHAARPEQKLISEEDLDIQMTQTTSSLSASLGDRVTISCRASQDISKYLNWYQQKPDGTVKLLIYHTSRLHSGVPSRFSGSGSGTDYSLTISNLEQEDIATYFCQQGNTLPYTFGGGTKLEITGGGGSGGGGSGGGGSEVKLQESGPGLVAPSQSLSVTCTVSGVSLPDYGVSWIRQPPRKGLEWLGVIWGSETTYYNSALKSRLTIIKDNSKSQVFLKMNSLQTDDTAIYYCAKHYYYGGSYAMDYWGQGTSVTVSSTTTPAPRPPTPAPTIASQPLSLRPEACFMYVAAAAFVLLFFVGCGVLLSKRKRKHAPKKKRKVGIHGVPGGLEGGGGSGGTASSRPGERPFQCRICMRNFSQKQALTRHTRTHTGEKPFQCRICMRNFSDRGNLTRHLRTHTGSQKPFQCRICMRNFSRSHDLTRHTRTHTGEKPFQCRICMRNFSHKSSLTRHLRTHTGSQKPFQCRICMRNFSEKQNLARHTRTHTGEKPFQCRICMRNFSDPSNLRRHLRTHLRGSTCRDEFPTMVFPSGQISQASALAPAPPQVLPQAPAPAPAPAMVSALAQAPAPVPVLAPGPPQAVAPPAPKPTQAGEGTLSEALLQLQFDDEDLGALLGNSTDPAVFTDLASVDNSEFQQLLNQGIPVAPHTTEPMLMEYPEAITRLVTGAQRPPDPAPAPLGAPGLPNGLLSGDEDFSSIADMDFSALLSQISS

SEQ ID NO: 6 - protein, 726 aa, Artificial Sequence
  Synthetic construct
MALPVTALLLPLALLLHAARPEQKLISEEDLDIQMTQTTSSLSASLGDRVTISCRASQDISKYLNWYQQKPDGTVKLLIYHTSRLHSGVPSRFSGSGSGTDYSLTISNLEQEDIATYFCQQGNTLPYTFGGGTKLEITGGGGSGGGGSGGGGSEVKLQESGPGLVAPSQSLSVTCTVSGVSLPDYGVSWIRQPPRKGLEWLGVIWGSETTYYNSALKSRLTIIKDNSKSQVFLKMNSLQTDDTAIYYCAKHYYYGGSYAMDYWGQGTSVTVSSTTTPAPRPPTPAPTIASQPLSLRPEACFMYVAAAAFVLLFFVGCGVLLSKRKRKHAPKKKRKVGIHGVPGGLEGGGGSGGTASSRPGERPFQCRICMRNFSQQTNLTRHTRTHTGEKPFQCRICMRNFSQSTSLQRHLRTHTGSQKPFQCRICMRNFSVRHNLTRHTRTHTGEKPFQCRICMRNFSDHSNLSRHLRTHTGSQKPFQCRICMRNFSEKQNLARHTRTHTGEKPFQCRICMRNFSDPSNLRRHLRTHLRGSTCRDEFPTMVFPSGQISQASALAPAPPQVLPQAPAPAPAPAMVSALAQAPAPVPVLAPGPPQAVAPPAPKPTQAGEGTLSEALLQLQFDDEDLGALLGNSTDPAVFTDLASVDNSEFQQLLNQGIPVAPHTTEPMLMEYPEAITRLVTGAQRPPDPAPAPLGAPGLPNGLLSGDEDFSSIADMDFSALLSQISS

SEQ ID NO: 7 - protein, 726 aa, Artificial Sequence
  Synthetic construct
MALPVTALLLPLALLLHAARPEQKLISEEDLDIQMTQTTSSLSASLGDRVTISCRASQDISKYLNWYQQKPDGTVKLLIYHTSRLHSGVPSRFSGSGSGTDYSLTISNLEQEDIATYFCQQGNTLPYTFGGGTKLEITGGGGSGGGGSGGGGSEVKLQESGPGLVAPSQSLSVTCTVSGVSLPDYGVSWIRQPPRKGLEWLGVIWGSETTYYNSALKSRLTIIKDNSKSQVFLKMNSLQTDDTAIYYCAKHYYYGGSYAMDYWGQGTSVTVSSTTTPAPRPPTPAPTIASQPLSLRPEACFMYVAAAAFVLLFFVGCGVLLSKRKRKHAPKKKRKVGIHGVPGGLEGGGGSGGTASSRPGERPFQCRICMRNFSQQTNLTRHTRTHTGEKPFQCRICMRNFSQKANLGVHLRTHTGSQKPFQCRICMRNFSDHSSLKRHTRTHTGEKPFQCRICMRNFSRADMLRRHLRTHTGSQKPFQCRICMRNFSEKQNLARHTRTHTGEKPFQCRICMRNFSDPSNLRRHLRTHLRGSTCRDEFPTMVFPSGQISQASALAPAPPQVLPQAPAPAPAPAMVSALAQAPAPVPVLAPGPPQAVAPPAPKPTQAGEGTLSEALLQLQFDDEDLGALLGNSTDPAVFTDLASVDNSEFQQLLNQGIPVAPHTTEPMLMEYPEAITRLVTGAQRPPDPAPAPLGAPGLPNGLLSGDEDFSSIADMDFSALLSQISS

SEQ ID NO: 8 - protein, 726 aa, Artificial Sequence
  Synthetic construct
MALPVTALLLPLALLLHAARPEQKLISEEDLDIQMTQTTSSLSASLGDRVTISCRASQDISKYLNWYQQKPDGTVKLLIYHTSRLHSGVPSRFSGSGSGTDYSLTISNLEQEDIATYFCQQGNTLPYTFGGGTKLEITGGGGSGGGGSGGGGSEVKLQESGPGLVAPSQSLSVTCTVSGVSLPDYGVSWIRQPPRKGLEWLGVIWGSETTYYNSALKSRLTIIKDNSKSQVFLKMNSLQTDDTAIYYCAKHYYYGGSYAMDYWGQGTSVTVSSTTTPAPRPPTPAPTIASQPLSLRPEACFMYVAAAAFVLLFFVGCGVLLSKRKRKHAPKKKRKVGIHGVPGGLEGGGGSGGTASSRPGERPFQCRICMRNFSRRHGLDRHTRTHTGEKPFQCRICMRNFSDHSSLKRHLRTHTGSQKPFQCRICMRNFSVRHNLTRHLRTHTGEKPFQCRICMRNFSDHSNLSRHLKTHTGSQKPFQCRICMRNFSQRSSLVRHLRTHTGEKPFQCRICMRNFSESGHLKRHLRTHLRGSTCRDEFPTMVFPSGQISQASALAPAPPQVLPQAPAPAPAPAMVSALAQAPAPVPVLAPGPPQAVAPPAPKPTQAGEGTLSEALLQLQFDDEDLGALLGNSTDPAVFTDLASVDNSEFQQLLNQGIPVAPHTTEPMLMEYPEAITRLVTGAQRPPDPAPAPLGAPGLPNGLLSGDEDFSSIADMDFSALLSQISS

SEQ ID NO: 9 - protein, 726 aa, Artificial Sequence
  Synthetic construct
MALPVTALLLPLALLLHAARPEQKLISEEDLDIQMTQTTSSLSASLGDRVTISCRASQDISKYLNWYQQKPDGTVKLLIYHTSRLHSGVPSRFSGSGSGTDYSLTISNLEQEDIATYFCQQGNTLPYTFGGGTKLEITGGGGSGGGGSGGGGSEVKLQESGPGLVAPSQSLSVTCTVSGVSLPDYGVSWIRQPPRKGLEWLGVIWGSETTYYNSALKSRLTIIKDNSKSQVFLKMNSLQTDDTAIYYCAKHYYYGGSYAMDYWGQGTSVTVSSTTTPAPRPPTPAPTIASQPLSLRPEACFMYVAAAAFVLLFFVGCGVLLSKRKRKHAPKKKRKVGIHGVPGGLEGGGGSGGTASSRPGERPFQCRICMRNFSQLSNLTRHTRTHTGEKPFQCRICMRNFSDRSSLKRHLRTHTGSQKPFQCRICMRNFSQRSSLVRHLRTHTGEKPFQCRICMRNFSRLDMLARHLKTHTGSQKPFQCRICMRNFSVRHSLTRHLRTHTGEKPFQCRICMRNFSESGALRRHLRTHLRGSTCRDEFPTMVFPSGQISQASALAPAPPQVLPQAPAPAPAPAMVSALAQAPAPVPVLAPGPPQAVAPPAPKPTQAGEGTLSEALLQLQFDDEDLGALLGNSTDPAVFTDLASVDNSEFQQLLNQGIPVAPHTTEPMLMEYPEAITRLVTGAQRPPDPAPAPLGAPGLPNGLLSGDEDFSSIADMDFSALLSQISS

SEQ ID NO: 10 - protein, 273 aa, Artificial Sequence
  Synthetic construct
MALPVTALLLPLALLLHAARPEQKLISEEDLDIQMTQTTSSLSASLGDRVTISCRASQDISKYLNWYQQKPDGTVKLLIYHTSRLHSGVPSRFSGSGSGTDYSLTISNLEQEDIATYFCQQGNTLPYTFGGGTKLEITGGGGSGGGGSGGGGSEVKLQESGPGLVAPSQSLSVTCTVSGVSLPDYGVSWIRQPPRKGLEWLGVIWGSETTYYNSALKSRLTIIKDNSKSQVFLKMNSLQTDDTAIYYCAKHYYYGGSYAMDYWGQGTSVTVSS

SEQ ID NO: 11 - protein, 32 aa, Artificial Sequence
  Synthetic construct
ILDYSFGGGAGRDIPPPLIEETVEPPPPAQLH

SEQ ID NO: 12 - protein, 24 aa, Artificial Sequence
  Synthetic construct
APAAAPEVSEEPRPLEPPEPSVPL

SEQ ID NO: 13 - protein, 20 aa, Artificial Sequence
  Synthetic construct
LYTAPPSTPPATSLTPERTQ

SEQ ID NO: 14 - protein, 16 aa, Artificial Sequence
  Synthetic construct
VHPHAGTAPPANQLPW

SEQ ID NO: 15 - protein, 32 aa, Artificial Sequence; identical to SEQ ID NO: 11
  Synthetic construct

SEQ ID NO: 16 - protein, 20 aa, Artificial Sequence
  Synthetic construct
LYTAPPSTPPATSLTPERTQ

SEQ ID NO: 17 - protein, 16 aa, Artificial Sequence
  Synthetic construct
VHPHAGTAPPANQLPW

SEQ ID NO: 18 - protein, 32 aa, Artificial Sequence; identical to SEQ ID NO: 11
  Synthetic construct

SEQ ID NO: 19 - protein, 9 aa, Artificial Sequence
  Synthetic construct
EPPPPAQLH

SEQ ID NO: 20 - protein, 45 aa, Artificial Sequence
  Synthetic construct
TTTPAPRPPTPAPTIASQPLSLRPEACRPAAGGAVHTRGLDFACD

SEQ ID NO: 21 - protein, 27 aa, Artificial Sequence
  Synthetic construct
TTTPAPRPPTPAPTIASQPLSLRPEAC

SEQ ID NO: 22 - protein, 39 aa, Artificial Sequence
  Synthetic construct
IEVMYPPPYLDNEKSNGTIIHVKGKHLCPSPLFPGPSKP

SEQ ID NO: 23 - protein, 27 aa, Artificial Sequence
  Synthetic construct
GGGGSGGGGSGGGGSESKYGPPCPPCP

SEQ ID NO: 24 - protein, 186 aa, Artificial Sequence [sequence omitted]

SEQ ID NO: 25 - protein, 33 aa, Artificial Sequence
  Synthetic construct
DYKDHDGDYKDHDIDYKDDDDKPVEPPLPSQLH

SEQ ID NO: 26 - protein, 29 aa, Artificial Sequence
  Synthetic construct
GGSGGSGGSGGSGGSGGSGGSGGSGGSLH

SEQ ID NO: 27 - protein, 27 aa, Artificial Sequence
  Synthetic construct
GGSGGSGGSPLGVRGKGGSGGSGGSLH

SEQ ID NO: 28 - protein, 32 aa, Artificial Sequence
  Synthetic construct
GGSGGSGGSSPLAQAVRSSSRGGSGGSGGSLH

SEQ ID NO: 29 - protein, 21 aa, Artificial Sequence
  Synthetic construct
ATVVIVVCVSFLVFMIILGVF

SEQ ID NO: 30 - protein, 22 aa, Artificial Sequence
  Synthetic construct
IATVVIIISVCMLVFVVAMGVY

SEQ ID NO: 31 - protein, 22 aa, Artificial Sequence
  Synthetic construct
FMYVAAAAFVLLFFVGCGVLLS

SEQ ID NO: 32 - protein, 23 aa, Artificial Sequence
  Synthetic construct
LLYLLAVAVVIILFIILLGVIMA

SEQ ID NO: 33 - protein, 22 aa, Artificial Sequence
  Synthetic construct
LPLLVAGAVLLLVILVLGVMVA

SEQ ID NO: 34 - protein, 24 aa, Artificial Sequence
  Synthetic construct
PVLCSPVAGVILLALGALLVLQLI

SEQ ID NO: 35 - protein, 24 aa, Artificial Sequence
  Synthetic construct
MYPMFLVLLALAVLALAAVGVVVS

SEQ ID NO: 36 - protein, 22 aa, Artificial Sequence
  Synthetic construct
VITGIILVIIALAFFGMVLSTQ

SEQ ID NO: 37 - protein, 22 aa, Artificial Sequence
  Synthetic construct
PMLSMLVIPLLIIFVFMMVIVN

SEQ ID NO: 38 - protein, 22 aa, Artificial Sequence
  Synthetic construct
PMYVVVAALVLLAFIGVGVLVS

SEQ ID NO: 39 - protein, 5 aa, Artificial Sequence
  Synthetic construct
RKRRR

SEQ ID NO: 40 - protein, 6 aa, Artificial Sequence
  Synthetic construct
KRKRKH

SEQ ID NO: 41 - protein, 4 aa, Artificial Sequence
  Synthetic construct
KRRR

SEQ ID NO: 42 - protein, 7 aa, Artificial Sequence
  Synthetic construct
RKKRKGK

SEQ ID NO: 43 - protein, 6 aa, Artificial Sequence
  Synthetic construct
KRKRTH

SEQ ID NO: 44 - protein, 13 aa, Artificial Sequence
  Synthetic construct
RRRLRKQARAHGK

SEQ ID NO: 45 - protein, 8 aa, Artificial Sequence
  Synthetic construct
KKGRRSYK

SEQ ID NO: 46 - protein, 14 aa, Artificial Sequence
  Synthetic construct
KTKKQRKKLHDRLR

SEQ ID NO: 47 - protein, 11 aa, Artificial Sequence
  Synthetic construct
KRKRRTKTIRR

SEQ ID NO: 48 - protein, 14 aa, Artificial Sequence
  Synthetic construct
RKRRKERERSRLPR

SEQ ID NO: 49 - protein, 8 aa, Artificial Sequence
  Synthetic construct
RSRKVDKR

SEQ ID NO: 50 - protein, 14 aa, Artificial Sequence
  Synthetic construct
KTKKQRKQMHNHLR

SEQ ID NO: 51 - protein, 10 aa, Artificial Sequence
  Synthetic construct
KKSKLAKKRK

SEQ ID NO: 52 - protein, 10 aa, Artificial Sequence
  Synthetic construct
RRRSKYSKAK

SEQ ID NO: 53 - protein, 10 aa, Artificial Sequence
  Synthetic construct
KKRKLAKKRK

SEQ ID NO: 54 - protein, 7 aa, Artificial Sequence
  Synthetic construct
RRRRREH

SEQ ID NO: 55 - protein, 398 aa, Artificial Sequence
  Synthetic construct
APKKKRKVGIHGVPGGLEGGGGSGGTASSRPGERPFQCRICMRNFSQKQALTRHTRTHTGEKPFQCRICMRNFSDRGNLTRHLRTHTGSQKPFQCRICMRNFSRSHDLTRHTRTHTGEKPFQCRICMRNFSHKSSLTRHLRTHTGSQKPFQCRICMRNFSEKQNLARHTRTHTGEKPFQCRICMRNFSDPSNLRRHLRTHLRGSTCRDEFPTMVFPSGQISQASALAPAPPQVLPQAPAPAPAPAMVSALAQAPAPVPVLAPGPPQAVAPPAPKPTQAGEGTLSEALLQLQFDDEDLGALLGNSTDPAVFTDLASVDNSEFQQLLNQGIPVAPHTTEPMLMEYPEAITRLVTGAQRPPDPAPAPLGAPGLPNGLLSGDEDFSSIADMDFSALLSQISS

SEQ ID NO: 56 - protein, 399 aa, Artificial Sequence
  Synthetic construct
MAPKKKRKVGIHGVPGGLEGGGGSGGTASSRPGERPFQCRICMRNFSQRSSLVRHTRTHTGEKPFQCRICMRNFSDKSVLARHLRTHTGSQKPFQCRICMRNFSQRSSLVRHTRTHTGEKPFQCRICMRNFSQRNNLGRHLRTHTGSQKPFQCRICMRNFSTHAVLTRHTRTHTGEKPFQCRICMRNFSDRGNLTRHLRTHLRGSTCRDEFPTMVFPSGQISQASALAPAPPQVLPQAPAPAPAPAMVSALAQAPAPVPVLAPGPPQAVAPPAPKPTQAGEGTLSEALLQLQFDDEDLGALLGNSTDPAVFTDLASVDNSEFQQLLNQGIPVAPHTTEPMLMEYPEAITRLVTGAQRPPDPAPAPLGAPGLPNGLLSGDEDFSSIADMDFSALLSQISS

SEQ ID NO: 57 - protein, 398 aa, Artificial Sequence
  Synthetic construct
APKKKRKVGIHGVPGGLEGGGGSGGTASSRPGERPFQCRICMRNFSQQTNLTRHTRTHTGEKPFQCRICMRNFSQSTSLQRHLRTHTGSQKPFQCRICMRNFSVRHNLTRHTRTHTGEKPFQCRICMRNFSDHSNLSRHLRTHTGSQKPFQCRICMRNFSEKQNLARHTRTHTGEKPFQCRICMRNFSDPSNLRRHLRTHLRGSTCRDEFPTMVFPSGQISQASALAPAPPQVLPQAPAPAPAPAMVSALAQAPAPVPVLAPGPPQAVAPPAPKPTQAGEGTLSEALLQLQFDDEDLGALLGNSTDPAVFTDLASVDNSEFQQLLNQGIPVAPHTTEPMLMEYPEAITRLVTGAQRPPDPAPAPLGAPGLPNGLLSGDEDFSSIADMDFSALLSQISS

SEQ ID NO: 58 - protein, 398 aa, Artificial Sequence
  Synthetic construct
APKKKRKVGIHGVPGGLEGGGGSGGTASSRPGERPFQCRICMRNFSQQTNLTRHTRTHTGEKPFQCRICMRNFSQKANLGVHLRTHTGSQKPFQCRICMRNFSDHSSLKRHTRTHTGEKPFQCRICMRNFSRADMLRRHLRTHTGSQKPFQCRICMRNFSEKQNLARHTRTHTGEKPFQCRICMRNFSDPSNLRRHLRTHLRGSTCRDEFPTMVFPSGQISQASALAPAPPQVLPQAPAPAPAPAMVSALAQAPAPVPVLAPGPPQAVAPPAPKPTQAGEGTLSEALLQLQFDDEDLGALLGNSTDPAVFTDLASVDNSEFQQLLNQGIPVAPHTTEPMLMEYPEAITRLVTGAQRPPDPAPAPLGAPGLPNGLLSGDEDFSSIADMDFSALLSQISS

SEQ ID NO: 59 - protein, 398 aa, Artificial Sequence
  Synthetic construct
APKKKRKVGIHGVPGGLEGGGGSGGTASSRPGERPFQCRICMRNFSRRHGLDRHTRTHTGEKPFQCRICMRNFSDHSSLKRHLRTHTGSQKPFQCRICMRNFSVRHNLTRHLRTHTGEKPFQCRICMRNFSDHSNLSRHLKTHTGSQKPFQCRICMRNFSQRSSLVRHLRTHTGEKPFQCRICMRNFSESGHLKRHLRTHLRGSTCRDEFPTMVFPSGQISQASALAPAPPQVLPQAPAPAPAPAMVSALAQAPAPVPVLAPGPPQAVAPPAPKPTQAGEGTLSEALLQLQFDDEDLGALLGNSTDPAVFTDLASVDNSEFQQLLNQGIPVAPHTTEPMLMEYPEAITRLVTGAQRPPDPAPAPLGAPGLPNGLLSGDEDFSSIADMDFSALLSQISS

SEQ ID NO: 60 - protein, 398 aa, Artificial Sequence
  Synthetic construct
APKKKRKVGIHGVPGGLEGGGGSGGTASSRPGERPFQCRICMRNFSQLSNLTRHTRTHTGEKPFQCRICMRNFSDRSSLKRHLRTHTGSQKPFQCRICMRNFSQRSSLVRHLRTHTGEKPFQCRICMRNFSRLDMLARHLKTHTGSQKPFQCRICMRNFSVRHSLTRHLRTHTGEKPFQCRICMRNFSESGALRRHLRTHLRGSTCRDEFPTMVFPSGQISQASALAPAPPQVLPQAPAPAPAPAMVSALAQAPAPVPVLAPGPPQAVAPPAPKPTQAGEGTLSEALLQLQFDDEDLGALLGNSTDPAVFTDLASVDNSEFQQLLNQGIPVAPHTTEPMLMEYPEAITRLVTGAQRPPDPAPAPLGAPGLPNGLLSGDEDFSSIADMDFSALLSQISS

SEQ ID NO: 61 - DNA, 20 bp, Artificial Sequence
  Synthetic construct
cgtcgaagtcgaagtcgacc

SEQ ID NO: 62 - DNA, 20 bp, Artificial Sequence
  Synthetic construct
ggacgacgttacggacgtac

SEQ ID NO: 63 - DNA, 20 bp, Artificial Sequence
  Synthetic construct
agacgtcgaagtagccgtag

SEQ ID NO: 64 - DNA, 20 bp, Artificial Sequence
  Synthetic construct
ggacgacgccgatgtagaag

SEQ ID NO: 65 - DNA, 20 bp, Artificial Sequence
  Synthetic construct
tgaagcagtcgacgccgaag

SEQ ID NO: 66 - DNA, 20 bp, Artificial Sequence
  Synthetic construct
ggacgacgcggtctaagaag

SEQ ID NO: 67 - DNA, 20 bp, Artificial Sequence
  Synthetic construct
cgacgaggtcgcataagtag

SEQ ID NO: 68 - DNA, 20 bp, Artificial Sequence
  Synthetic construct
agacgcagtataggtcgaac

SEQ ID NO: 69 - DNA, 20 bp, Artificial Sequence
  Synthetic construct
agacgcagtataggacgacg

SEQ ID NO: 70 - DNA, 20 bp, Artificial Sequence
  Synthetic construct
cggcgtagccgatgtcgcgc

SEQ ID NO: 71 - DNA, 20 bp, Artificial Sequence
  Synthetic construct
ggtcgttgcggtagtcgaag

SEQ ID NO: 72 - protein, 21 aa, Artificial Sequence
  Synthetic construct
MALPVTALLLPLALLLHAARP

SEQ ID NO: 73 - protein, 10 aa, Artificial Sequence
  Synthetic construct
EQKLISEEDL

SEQ ID NO: 74 - DNA, 385 bp, Artificial Sequence
  Synthetic construct
acgattgagtaacactgtatctagtctacctacagggctggacgacgttacggacgtacggatagcgtcaacctcttggacgacgttacggacgtacaatcagttctcccgaggtggacgacgttacggacgtacagagccgtgcttccaataggacgacgttacggacgtaccgggtttcgtaacaatcgcatgaggattcgcaacgccttggacgacgttacggacgtactcccgtctcagtaaaggtggacgacgttacggacgtacaatcggactgccttcgtaggacgacgttacggacgtacgtatcagtcgcctcggaaggacgacgttacggacgtacattcgtaagaggctcactctcccttacacggagtggata

SEQ ID NO: 75 - DNA, 385 bp, Artificial Sequence
  Synthetic construct
acgattgagtaacactgtatctagtctacctacagggctagacgtcgaagtagccgtagggatagcgtcaacctcttagacgtcgaagtagccgtagaatcagttctcccgaggtagacgtcgaagtagccgtagagagccgtgcttccaataagacgtcgaagtagccgtagcgggtttcgtaacaatcgcatgaggattcgcaacgccttagacgtcgaagtagccgtagtcccgtctcagtaaaggtagacgtcgaagtagccgtagaatcggactgccttcgtaagacgtcgaagtagccgtaggtatcagtcgcctcggaaagacgtcgaagtagccgtagattcgtaagaggctcactctcccttacacggagtggata

SEQ ID NO: 76 - DNA, 385 bp, Artificial Sequence
  Synthetic construct
acgattgagtaacactgtatctagtctacctacagggctggacgacgccgatgtagaagggatagcgtcaacctcttggacgacgccgatgtagaagaatcagttctcccgaggtggacgacgccgatgtagaagagagccgtgcttccaataggacgacgccgatgtagaagcgggtttcgtaacaatcgcatgaggattcgcaacgccttagacgacgccgatgtagaagtcccgtctcagtaaaggtggacgacgccgatgtagaagaatcggactgccttcgtaggacgacgccgatgtagaaggtatcagtcgcctcggaaggacgacgccgatgtagaagattcgtaagaggctcactctcccttacacggagtggata

SEQ ID NO: 77 - DNA, 385 bp, Artificial Sequence
  Synthetic construct
acgattgagtaacactgtatctagtctacctacagggctggacgacgcggtctaagaagggatagcgtcaacctcttggacgacgcggtctaagaagaatcagttctcccgaggtggacgacgcggtctaagaagagagccgtgcttccaataggacgacgcggtctaagaagcgggtttcgtaacaatcgcatgaggattcgcaacgccttggacgacgcggtctaagaagtcccgtctcagtaaaggtggacgacgcggtctaagaagaatcggactgccttcgtaggacgacgcggtctaagaaggtatcagtcgcctcggaaggacgacgcggtctaagaagattcgtaagaggctcactctcccttacacggagtggata

SEQ ID NO: 78 - DNA, 385 bp, Artificial Sequence
  Synthetic construct
acgattgagtaacactgtatctagtctacctacagggctcggcgtagccgatgtcgcgcggatagcgtcaacctcttcggcgtagccgatgtcgcgcaatcagttctcccgaggtcggcgtagccgatgtcgcgcagagccgtgcttccaatacggcgtagccgatgtcgcgccgggtttcgtaacaatcgcatgaggattcgcaacgccttcggcgtagccgatgtcgcgctcccgtctcagtaaaggtcggcgtagccgatgtcgcgcaatcggactgccttcgtacggcgtagccgatgtcgcgcgtatcagtcgcctcggaacggcgtagccgatgtcgcgcattcgtaagaggctcactctcccttacacggagtggata

SEQ ID NO: 79 - DNA, 385 bp, Artificial Sequence
  Synthetic construct
acgattgagtaacactgtatctagtctacctacagggctggtcgttgcggtagtcgaagggatagcgtcaacctcttggtcgttgcggtagtcgaagaatcagttctcccgaggtggtcgttgcggtagtcgaagagagccgtgcttccaataggtcgttgcggtagtcgaagcgggtttcgtaacaatcgcatgaggattcgcaacgccttggtcgttgcggtagtcgaagtcccgtctcagtaaaggtggtcgttgcggtagtcgaagaatcggactgccttcgtaggtcgttgcggtagtcgaaggtatcagtcgcctcggaaggtcgttgcggtagtcgaagattcgtaagaggctcactctcccttacacggagtggata

SEQ ID NO: 80 - protein, 4 aa, Artificial sequence
  Synthetic construct
GGGS

SEQ ID NO: 81 - protein, 4 aa, Artificial sequence
  Synthetic construct
SGGG

SEQ ID NO: 82 - protein, 4 aa, Artificial sequence
  Synthetic construct
SGSG

SEQ ID NO: 83 - protein, 5 aa, Artificial sequence
  Synthetic construct
GGGGS

SEQ ID NO: 84 - protein, 5 aa, Artificial sequence
  Synthetic construct
SGGGG

SEQ ID NO: 85 - protein, 6 aa, Artificial sequence
  Synthetic construct
GGGGGS

SEQ ID NO: 86 - protein, 6 aa, Artificial sequence
  Synthetic construct
SGGGGG

SEQ ID NO: 87 - protein, 7 aa, Artificial sequence
  Synthetic construct
GGGGGGS

SEQ ID NO: 88 - protein, 7 aa, Artificial sequence
  Synthetic construct
SGGGGGG

SEQ ID NO: 89 - protein, 5 aa, Artificial sequence
  Synthetic construct
GGGGS

SEQ ID NO: 90 - protein, 5 aa, Artificial sequence
  Synthetic construct
SGGGG

SEQ ID NO: 91 - protein, 25 aa, Artificial sequence
  Synthetic construct
  MISC_FEATURE (1)..(20): Bases 1-20 may be present or absent
  MISC_FEATURE (1)..(20): X is any amino acid that can be inserted into the sequence and not result in a polypeptide comprising the sequence GSG
GGGXXGGGXXGGGXXGGGXXGGGGS

SEQ ID NO: 92 - protein, 25 aa, Artificial sequence
  Synthetic construct
  MISC_FEATURE (1)..(25): X is any amino acid that can be inserted into the sequence and not result in a polypeptide comprising the sequence GSG
  MISC_FEATURE (6)..(25): Bases 6-25 may be present or absent
GGGGSXGGGSXGGGSXGGGSXGGGS

SEQ ID NO: 93 - protein, 25 aa, Artificial sequence
  Synthetic construct
  MISC_FEATURE (1)..(20): Bases 1-20 may be present or absent
  MISC_FEATURE (4)..(4): X is proline
  MISC_FEATURE (5)..(5): X is serine
  MISC_FEATURE (9)..(9): X is proline
  MISC_FEATURE (10)..(10): X is serine
  MISC_FEATURE (14)..(14): X is proline
  MISC_FEATURE (15)..(15): X is serine
  MISC_FEATURE (19)..(19): X is proline
  MISC_FEATURE (20)..(20): X is serine
GGGXXGGGXXGGGXXGGGXXGGGGS

SEQ ID NO: 94 - protein, 25 aa, Artificial sequence
  Synthetic construct
  MISC_FEATURE (1)..(20): Bases 1-20 may be present or absent
  MISC_FEATURE (4)..(4): X is glycine
  MISC_FEATURE (5)..(5): X is glutamine
  MISC_FEATURE (9)..(9): X is glycine
  MISC_FEATURE (10)..(10): X is glutamine
  MISC_FEATURE (14)..(14): X is glycine
  MISC_FEATURE (15)..(15): X is glutamine
  MISC_FEATURE (19)..(19): X is glycine
  MISC_FEATURE (20)..(20): X is glutamine
GGGXXGGGXXGGGXXGGGXXGGGGS

SEQ ID NO: 95 - protein, 25 aa, Artificial sequence
  Synthetic construct
  MISC_FEATURE (1)..(20): Bases 1-20 may be present or absent
  MISC_FEATURE (4)..(4): X is glycine
  MISC_FEATURE (5)..(5): X is alanine
  MISC_FEATURE (9)..(9): X is glycine
  MISC_FEATURE (10)..(10): X is alanine
  MISC_FEATURE (14)..(14): X is glycine
  MISC_FEATURE (15)..(15): X is alanine
  MISC_FEATURE (19)..(19): X is glycine
  MISC_FEATURE (20)..(20): X is alanine
GGGXXGGGXXGGGXXGGGXXGGGGS

SEQ ID NO: 96 - protein, 25 aa, Artificial sequence
  Synthetic construct
  MISC_FEATURE (1)..(25): X is proline
  MISC_FEATURE (6)..(25): Bases 6-25 may be present or absent
GGGGSXGGGSXGGGSXGGGSXGGGS

SEQ ID NO: 97 - protein, 15 aa, Artificial sequence
  Synthetic construct
GGGGAGGGGAGGGGS

SEQ ID NO: 98 - protein, 15 aa, Artificial sequence
  Synthetic construct
GGGGQGGGGQGGGGS

SEQ ID NO: 99 - protein, 15 aa, Artificial sequence
  Synthetic construct
GGGPSGGGPSGGGGS

SEQ ID NO: 100 - protein, 15 aa, Artificial sequence
  Synthetic construct
GGGGSPGGGSPGGGS

SEQ ID NO: 101 - protein, 4 aa, Artificial sequence
  Synthetic construct
  MISC_FEATURE (2)..(3): X represents an arbitrary residue
  MISC_FEATURE (4)..(4): X represents a hydrophobic residue such as Leu, Ile, Val, Phe, Trp, Tyr, Val, Met, and Pro
PXXX

SEQ ID NO: 102 - protein, 5 aa, Artificial sequence
  Synthetic construct
  MISC_FEATURE (2)..(3): X represents an arbitrary residue
  MISC_FEATURE (4)..(4): X represents a hydrophobic residue such as Leu, Ile, Val, Phe, Trp, Tyr, Val, Met, and Pro
  MISC_FEATURE (5)..(5): X is either Ser or Thr
PXXXX

SEQ ID NO: 103 - protein, 6 aa, Artificial sequence
  Synthetic construct
  MISC_FEATURE (2)..(2): X is either Leu or Gln
PXGMTS

SEQ ID NO: 104 - protein, 5 aa, Artificial sequence
  Synthetic construct
  MISC_FEATURE (2)..(2): X is either Leu or Gly
PXGMT

SEQ ID NO: 105 - protein, 3 aa, Artificial sequence
  Synthetic construct
VGR

SEQ ID NO: 106 - protein, 7 aa, Artificial sequence
  Synthetic construct
ENLYTQS

SEQ ID NO: 107 - protein, 5 aa, Artificial sequence
  Synthetic construct
DDDDK

SEQ ID NO: 108 - protein, 4 aa, Artificial sequence
  Synthetic construct
LVPR

SEQ ID NO: 109 - protein, 39 aa, Artificial sequence
  Synthetic construct
SKRKRKHAPKKKRKVGIHGVPGGLEGGGGSGGTASSRPG

SEQ ID NO: 110 - protein, 10 aa, Artificial sequence
  Synthetic construct
LRGSTCRDEF

SEQ ID NO: 111 - protein, 7 aa, Artificial sequence
  Synthetic construct
PAPKPTQ

SEQ ID NO: 112 - protein, 4 aa, Artificial sequence
  Synthetic construct
QISS

SEQ ID NO: 113 - protein, 725 aa, Artificial sequence
  Synthetic construct
MALPVTALLLPLALLLHAARPEQKLISEEDLDIQMTQTTSSLSASLGDRVTISCRASQDISKYLNWYQQKPDGTVKLLIYHTSRLHSGVPSRFSGSGSGTDYSLTISNLEQEDIATYFCQQGNTLPYTFGGGTKLEITGGGGSGGGGSGGGGSEVKLQESGPGLVAPSQSLSVTCTVSGVSLPDYGVSWIRQPPRKGLEWLGVIWGSETTYYNSALKSRLTIIKDNSKSQVFLKMNSLQTDDTAIYYCAKHYYYGGSYAMDYWGQGTSVTVSSTTTPAPRPPTPAPTIASQPLSLRPEACFMYVAAAAFVLLFFVGCGVLLSKRKRKHPKKKRKVGIHGVPGGLEGGGGSGGTASSRPGERPFQCRICMRNFSQQTNLTRHTRTHTGEKPFQCRICMRNFSQKANLGVHLRTHTGSQKPFQCRICMRNFSDHSSLKRHTRTHTGEKPFQCRICMRNFSRADMLRRHLRTHTGSQKPFQCRICMRNFSEKQNLARHTRTHTGEKPFQCRICMRNFSDPSNLRRHLRTHLRGSTCRDEFPTMVFPSGQISQASALAPAPPQVLPQAPAPAPAPAMVSALAQAPAPVPVLAPGPPQAVAPPAPKPTQAGEGTLSEALLQLQFDDEDLGALLGNSTDPAVFTDLASVDNSEFQQLLNQGIPVAPHTTEPMLMEYPEAITRLVTGAQRPPDPAPAPLGAPGLPNGLLSGDEDFSSIADMDFSALLSQISS

SEQ ID NO: 114 - protein, 718 aa, Artificial sequence
  Synthetic construct
MALPVTALLLPLALLLHAARPEQKLISEEDLDIQMTQTTSSLSASLGDRVTISCRASQDISKYLNWYQQKPDGTVKLLIYHTSRLHSGVPSRFSGSGSGTDYSLTISNLEQEDIATYFCQQGNTLPYTFGGGTKLEITGGGGSGGGGSGGGGSEVKLQESGPGLVAPSQSLSVTCTVSGVSLPDYGVSWIRQPPRKGLEWLGVIWGSETTYYNSALKSRLTIIKDNSKSQVFLKMNSLQTDDTAIYYCAKHYYYGGSYAMDYWGQGTSVTVSSTTTPAPRPPTPAPTIASQPLSLRPEACFMYVAAAAFVLLFFVGCGVLLSKRKRKHAPKKKRKVLEGGGGSGGTASSRPGERPFQCRICMRNFSQQTNLTRHTRTHTGEKPFQCRICMRNFSQKANLGVHLRTHTGSQKPFQCRICMRNFSDHSSLKRHTRTHTGEKPFQCRICMRNFSRADMLRRHLRTHTGSQKPFQCRICMRNFSEKQNLARHTRTHTGEKPFQCRICMRNFSDPSNLRRHLRTHLRGSTCRDEFPTMVFPSGQISQASALAPAPPQVLPQAPAPAPAPAMVSALAQAPAPVPVLAPGPPQAVAPPAPKPTQAGEGTLSEALLQLQFDDEDLGALLGNSTDPAVFTDLASVDNSEFQQLLNQGIPVAPHTTEPMLMEYPEAITRLVTGAQRPPDPAPAPLGAPGLPNGLLSGDEDFSSIADMDFSALLSQISS

SEQ ID NO: 115 - protein, 717 aa, Artificial sequence
  Synthetic construct
MALPVTALLLPLALLLHAARPEQKLISEEDLDIQMTQTTSSLSASLGDRVTISCRASQDISKYLNWYQQKPDGTVKLLIYHTSRLHSGVPSRFSGSGSGTDYSLTISNLEQEDIATYFCQQGNTLPYTFGGGTKLEITGGGGSGGGGSGGGGSEVKLQESGPGLVAPSQSLSVTCTVSGVSLPDYGVSWIRQPPRKGLEWLGVIWGSETTYYNSALKSRLTIIKDNSKSQVFLKMNSLQTDDTAIYYCAKHYYYGGSYAMDYWGQGTSVTVSSTTTPAPRPPTPAPTIASQPLSLRPEACFMYVAAAAFVLLFFVGCGVLLSKRKRKHPKKKRKVLEGGGGSGGTASSRPGERPFQCRICMRNFSQQTNLTRHTRTHTGEKPFQCRICMRNFSQKANLGVHLRTHTGSQKPFQCRICMRNFSDHSSLKRHTRTHTGEKPFQCRICMRNFSRADMLRRHLRTHTGSQKPFQCRICMRNFSEKQNLARHTRTHTGEKPFQCRICMRNFSDPSNLRRHLRTHLRGSTCRDEFPTMVFPSGQISQASALAPAPPQVLPQAPAPAPAPAMVSALAQAPAPVPVLAPGPPQAVAPPAPKPTQAGEGTLSEALLQLQFDDEDLGALLGNSTDPAVFTDLASVDNSEFQQLLNQGIPVAPHTTEPMLMEYPEAITRLVTGAQRPPDPAPAPLGAPGLPNGLLSGDEDFSSIADMDFSALLSQISS

SEQ ID NO: 116 - protein, 706 aa, Artificial sequence
  Synthetic construct
MALPVTALLLPLALLLHAARPEQKLISEEDLDIQMTQTTSSLSASLGDRVTISCRASQDISKYLNWYQQKPDGTVKLLIYHTSRLHSGVPSRFSGSGSGTDYSLTISNLEQEDIATYFCQQGNTLPYTFGGGTKLEITGGGGSGGGGSGGGGSEVKLQESGPGLVAPSQSLSVTCTVSGVSLPDYGVSWIRQPPRKGLEWLGVIWGSETTYYNSALKSRLTIIKDNSKSQVFLKMNSLQTDDTAIYYCAKHYYYGGSYAMDYWGQGTSVTVSSTTTPAPRPPTPAPTIASQPLSLRPEACFMYVAAAAFVLLFFVGCGVLLSKRKRKHAPKKKRKVSRPGERPFQCRICMRNFSQQTNLTRHTRTHTGEKPFQCRICMRNFSQKANLGVHLRTHTGSQKPFQCRICMRNFSDHSSLKRHTRTHTGEKPFQCRICMRNFSRADMLRRHLRTHTGSQKPFQCRICMRNFSEKQNLARHTRTHTGEKPFQCRICMRNFSDPSNLRRHLRTHLRGSTCRDEFPTMVFPSGQISQASALAPAPPQVLPQAPAPAPAPAMVSALAQAPAPVPVLAPGPPQAVAPPAPKPTQAGEGTLSEALLQLQFDDEDLGALLGNSTDPAVFTDLASVDNSEFQQLLNQGIPVAPHTTEPMLMEYPEAITRLVTGAQRPPDPAPAPLGAPGLPNGLLSGDEDFSSIADMDFSALLSQISS

SEQ ID NO: 117 - protein, 705 aa, Artificial sequence
  Synthetic construct
MALPVTALLLPLALLLHAARPEQKLISEEDLDIQMTQTTSSLSASLGDRVTISCRASQDISKYLNWYQQKPDGTVKLLIYHTSRLHSGVPSRFSGSGSGTDYSLTISNLEQEDIATYFCQQGNTLPYTFGGGTKLEITGGGGSGGGGSGGGGSEVKLQESGPGLVAPSQSLSVTCTVSGVSLPDYGVSWIRQPPRKGLEWLGVIWGSETTYYNSALKSRLTIIKDNSKSQVFLKMNSLQTDDTAIYYCAKHYYYGGSYAMDYWGQGTSVTVSSTTTPAPRPPTPAPTIASQPLSLRPEACFMYVAAAAFVLLFFVGCGVLLSKRKRKHPKKKRKVSRPGERPFQCRICMRNFSQQTNLTRHTRTHTGEKPFQCRICMRNFSQKANLGVHLRTHTGSQKPFQCRICMRNFSDHSSLKRHTRTHTGEKPFQCRICMRNFSRADMLRRHLRTHTGSQKPFQCRICMRNFSEKQNLARHTRTHTGEKPFQCRICMRNFSDPSNLRRHLRTHLRGSTCRDEFPTMVFPSGQISQASALAPAPPQVLPQAPAPAPAPAMVSALAQAPAPVPVLAPGPPQAVAPPAPKPTQAGEGTLSEALLQLQFDDEDLGALLGNSTDPAVFTDLASVDNSEFQQLLNQGIPVAPHTTEPMLMEYPEAITRLVTGAQRPPDPAPAPLGAPGLPNGLLSGDEDFSSIADMDFSALLSQISS

SEQ ID NO: 118 - protein, 721 aa, Artificial sequence
  Synthetic construct
MALPVTALLLPLALLLHAARPEQKLISEEDLDIQMTQTTSSLSASLGDRVTISCRASQDISKYLNWYQQKPDGTVKLLIYHTSRLHSGVPSRFSGSGSGTDYSLTISNLEQEDIATYFCQQGNTLPYTFGGGTKLEITGGGGSGGGGSGGGGSEVKLQESGPGLVAPSQSLSVTCTVSGVSLPDYGVSWIRQPPRKGLEWLGVIWGSETTYYNSALKSRLTIIKDNSKSQVFLKMNSLQTDDTAIYYCAKHYYYGGSYAMDYWGQGTSVTVSSTTTPAPRPPTPAPTIASQPLSLRPEACFMYVAAAAFVLLFFVGCGVLLSKRKRKHAPKKKRKVGIHGVPGGLEGGGGSGGTASSRPGERPFQCRICMRNFSQQTNLTRHTRTHTGEKPFQCRICMRNFSQKANLGVHLRTHTGSQKPFQCRICMRNFSDHSSLKRHTRTHTGEKPFQCRICMRNFSRADMLRRHLRTHTGSQKPFQCRICMRNFSEKQNLARHTRTHTGEKPFQCRICMRNFSDPSNLRRHLRTHLRDEFPTMVFPSGQISQASALAPAPPQVLPQAPAPAPAPAMVSALAQAPAPVPVLAPGPPQAVAPPAPKPTQAGEGTLSEALLQLQFDDEDLGALLGNSTDPAVFTDLASVDNSEFQQLLNQGIPVAPHTTEPMLMEYPEAITRLVTGAQRPPDPAPAPLGAPGLPNGLLSGDEDFSSIADMDFSALLSQISS

SEQ ID NO: 119 - protein, 654 aa, Artificial sequence
  Synthetic construct
MALPVTALLLPLALLLHAARPEQKLISEEDLDIQMTQTTSSLSASLGDRVTISCRASQDISKYLNWYQQKPDGTVKLLIYHTSRLHSGVPSRFSGSGSGTDYSLTISNLEQEDIATYFCQQGNTLPYTFGGGTKLEITGGGGSGGGGSGGGGSEVKLQESGPGLVAPSQSLSVTCTVSGVSLPDYGVSWIRQPPRKGLEWLGVIWGSETTYYNSALKSRLTIIKDNSKSQVFLKMNSLQTDDTAIYYCAKHYYYGGSYAMDYWGQGTSVTVSSTTTPAPRPPTPAPTIASQPLSLRPEACFMYVAAAAFVLLFFVGCGVLLSKRKRKHAPKKKRKVGIHGVPGGLEGGGGSGGTASSRPGERPFQCRICMRNFSQQTNLTRHTRTHTGEKPFQCRICMRNFSQKANLGVHLRTHTGSQKPFQCRICMRNFSDHSSLKRHTRTHTGEKPFQCRICMRNFSRADMLRRHLRTHTGSQKPFQCRICMRNFSEKQNLARHTRTHTGEKPFQCRICMRNFSDPSNLRRHLRTHLRPTQAGEGTLSEALLQLQFDDEDLGALLGNSTDPAVFTDLASVDNSEFQQLLNQGIPVAPHTTEPMLMEYPEAITRLVTGAQRPPDPAPAPLGAPGLPNGLLSGDEDFSSIADMDFSALLSQISS

SEQ ID NO: 120 - protein, 726 aa, Artificial sequence; identical to SEQ ID NO: 7
  Synthetic construct

SEQ ID NO: 121 - protein, 700 aa, Artificial sequence
  Synthetic construct
MALPVTALLLPLALLLHAARPEQKLISEEDLDIQMTQTTSSLSASLGDRVTISCRASQDISKYLNWYQQKPDGTVKLLIYHTSRLHSGVPSRFSGSGSGTDYSLTISNLEQEDIATYFCQQGNTLPYTFGGGTKLEITGGGGSGGGGSGGGGSEVKLQESGPGLVAPSQSLSVTCTVSGVSLPDYGVSWIRQPPRKGLEWLGVIWGSETTYYNSALKSRLTIIKDNSKSQVFLKMNSLQTDDTAIYYCAKHYYYGGSYAMDYWGQGTSVTVSSTTTPAPRPPTPAPTIASQPLSLRPEACFMYVAAAAFVLLFFVGCGVLLSKRKRKHPKKKRKVSRPGERPFQCRICMRNFSQQTNLTRHTRTHTGEKPFQCRICMRNFSQKANLGVHLRTHTGSQKPFQCRICMRNFSDHSSLKRHTRTHTGEKPFQCRICMRNFSRADMLRRHLRTHTGSQKPFQCRICMRNFSEKQNLARHTRTHTGEKPFQCRICMRNFSDPSNLRRHLRTHLRDEFPTMVFPSGQISQASALAPAPPQVLPQAPAPAPAPAMVSALAQAPAPVPVLAPGPPQAVAPPAPKPTQAGEGTLSEALLQLQFDDEDLGALLGNSTDPAVFTDLASVDNSEFQQLLNQGIPVAPHTTEPMLMEYPEAITRLVTGAQRPPDPAPAPLGAPGLPNGLLSGDEDFSSIADMDFSALLSQISS

SEQ ID NO: 122 - protein, 700 aa, Artificial sequence
  Synthetic construct
MALPVTALLLPLALLLHAARPEQKLISEEDLDIQMTQTTSSLSASLGDRVTISCRASQDISKYLNWYQQKPDGTVKLLIYHTSRLHSGVPSRFSGSGSGTDYSLTISNLEQEDIATYFCQQGNTLPYTFGGGTKLEITGGGGSGGGGSGGGGSEVKLQESGPGLVAPSQSLSVTCTVSGVSLPDYGVSWIRQPPRKGLEWLGVIWGSETTYYNSALKSRLTIIKDNSKSQVFLKMNSLQTDDTAIYYCAKHYYYGGSYAMDYWGQGTSVTVSSTTTPAPRPPTPAPTIASQPLSLRPEACFMYVAAAAFVLLFFVGCGVLLSKRKRKHPKKKRKVSRPGERPFQCRICMRNFSRRHGLDRHTRTHTGEKPFQCRICMRNFSDHSSLKRHLRTHTGSQKPFQCRICMRNFSVRHNLTRHLRTHTGEKPFQCRICMRNFSDHSNLSRHLKTHTGSQKPFQCRICMRNFSQRSSLVRHLRTHTGEKPFQCRICMRNFSESGHLKRHLRTHLRDEFPTMVFPSGQISQASALAPAPPQVLPQAPAPAPAPAMVSALAQAPAPVPVLAPGPPQAVAPPAPKPTQAGEGTLSEALLQLQFDDEDLGALLGNSTDPAVFTDLASVDNSEFQQLLNQGIPVAPHTTEPMLMEYPEAITRLVTGAQRPPDPAPAPLGAPGLPNGLLSGDEDFSSIADMDFSALLSQISS

SEQ ID NO: 123 - protein, 728 aa, Artificial sequence
  Synthetic construct
MALPVTALLLPLALLLHAARPEQKLISEEDLDIQMTQTTSSLSASLGDRVTISCRASQDISKYLNWYQQKPDGTVKLLIYHTSRLHSGVPSRFSGSGSGTDYSLTISNLEQEDIATYFCQQGNTLPYTFGGGTKLEITGGGGSGGGGSGGGGSEVKLQESGPGLVAPSQSLSVTCTVSGVSLPDYGVSWIRQPPRKGLEWLGVIWGSETTYYNSALKSRLTIIKDNSKSQVFLKMNSLQTDDTAIYYCAKHYYYGGSYAMDYWGQGTSVTVSSILDYSFGGGAGRDIPPPLIEETVEPPPPAQLHFMYVAAAAFVLLFFVGCGVLLSKRKRKHARRKKGIHGVPGGLEGGGGSGGTASSRPGERPFQCRICMRNFSQRSSLVRHTRTHTGEKPFQCRICMRNFSDKSVLARHLRTHTGSQKPFQCRICMRNFSQRSSLVRHTRTHTGEKPFQCRICMRNFSQRNNLGRHLRTHTGSQKPFQCRICMRNFSTHAVLTRHTRTHTGEKPFQCRICMRNFSDRGNLTRHLRTHLRGSTCRDEFPTMVFPSGQISQASALAPAPPQVLPQAPAPAPAPAMVSALAQAPAPVPVLAPGPPQAVAPPAPKPTQAGEGTLSEALLQLQFDDEDLGALLGNSTDPAVFTDLASVDNSEFQQLLNQGIPVAPHTTEPMLMEYPEAITRLVTGAQRPPDPAPAPLGAPGLPNGLLSGDEDFSSIADMDFSALLSQISS

SEQ ID NO: 124 - protein, 700 aa, Artificial sequence; identical to SEQ ID NO: 121
  Synthetic construct

SEQ ID NO: 125 - protein, 561 aa, Artificial sequence
  Synthetic construct
MALPVTALLLPLALLLHAARPEQKLISEEDLDIQMTQTTSSLSASLGDRVTISCRASQDISKYLNWYQQKPDGTVKLLIYHTSRLHSGVPSRFSGSGSGTDYSLTISNLEQEDIATYFCQQGNTLPYTFGGGTKLEITGGGGSGGGGSGGGGSEVKLQESGPGLVAPSQSLSVTCTVSGVSLPDYGVSWIRQPPRKGLEWLGVIWGSETTYYNSALKSRLTIIKDNSKSQVFLKMNSLQTDDTAIYYCAKHYYYGGSYAMDYWGQGTSVTVSSTTTPAPRPPTPAPTIASQPLSLRPEACFMYVAAAAFVLLFFVGCGVLLSKRKRKHPKKKRKVSRPGERPFQCRICMRNFSQQTNLTRHTRTHTGEKPFQCRICMRNFSQKANLGVHLRTHTGSQKPFQCRICMRNFSDHSSLKRHTRTHTGEKPFQCRICMRNFSRADMLRRHLRTHTGSQKPFQCRICMRNFSEKQNLARHTRTHTGEKPFQCRICMRNFSDPSNLRRHLRTHLRDALDDFDLDMLGSDALDDFDLDMLGSDALDDFDLDMLGSDALDDFDLDMLGS

SEQ ID NO: 126 - protein, 700 aa, Artificial sequence; identical to SEQ ID NO: 122
  Synthetic construct

SEQ ID NO: 127 - protein, 561 aa, Artificial sequence
  Synthetic construct
MALPVTALLLPLALLLHAARPEQKLISEEDLDIQMTQTTSSLSASLGDRVTISCRASQDISKYLNWYQQKPDGTVKLLIYHTSRLHSGVPSRFSGSGSGTDYSLTISNLEQEDIATYFCQQGNTLPYTFGGGTKLEITGGGGSGGGGSGGGGSEVKLQESGPGLVAPSQSLSVTCTVSGVSLPDYGVSWIRQPPRKGLEWLGVIWGSETTYYNSALKSRLTIIKDNSKSQVFLKMNSLQTDDTAIYYCAKHYYYGGSYAMDYWGQGTSVTVSSTTTPAPRPPTPAPTIASQPLSLRPEACFMYVAAAAFVLLFFVGCGVLLSKRKRKHPKKKRKVSRPGERPFQCRICMRNFSRRHGLDRHTRTHTGEKPFQCRICMRNFSDHSSLKRHLRTHTGSQKPFQCRICMRNFSVRHNLTRHLRTHTGEKPFQCRICMRNFSDHSNLSRHLKTHTGSQKPFQCRICMRNFSQRSSLVRHLRTHTGEKPFQCRICMRNFSESGHLKRHLRTHLRDALDDFDLDMLGSDALDDFDLDMLGSDALDDFDLDMLGSDALDDFDLDMLGS

SEQ ID NO: 128 - protein, 678 aa, Artificial sequence
  Synthetic construct
MALPVTALLLPLALLLHAARPEQKLISEEDLDIQMTQTTSSLSASLGDRVTISCRASQDISKYLNWYQQKPDGTVKLLIYHTSRLHSGVPSRFSGSGSGTDYSLTISNLEQEDIATYFCQQGNTLPYTFGGGTKLEITGGGGSGGGGSGGGGSEVKLQESGPGLVAPSQSLSVTCTVSGVSLPDYGVSWIRQPPRKGLEWLGVIWGSETTYYNSALKSRLTIIKDNSKSQVFLKMNSLQTDDTAIYYCAKHYYYGGSYAMDYWGQGTSVTVSSTTTPAPRPPTPAPTIASQPLSLRPEACFMYVAAAAFVLLFFVGCGVLLSKRKRKHMKLLSSIEQACDICRLKKLKCSKEKPKCAKCLKNNWECRYSPKTKRSPLTRAHLTEVESRLERLEQLFLLIFPREDLDMILKMDSLQDIKALLTGLFVQDNVNKDAVTDRLASVETDMPLTLRQHRISATSSSEESSNKGQRQLTVSAAAGGSGGSGGSDEFPTMVFPSGQISQASALAPAPPQVLPQAPAPAPAPAMVSALAQAPAPVPVLAPGPPQAVAPPAPKPTQAGEGTLSEALLQLQFDDEDLGALLGNSTDPAVFTDLASVDNSEFQQLLNQGIPVAPHTTEPMLMEYPEAITRLVTGAQRPPDPAPAPLGAPGLPNGLLSGDEDFSSIADMDFSALLSQISS

SEQ ID NO: 129 - protein, 539 aa, Artificial sequence
  Synthetic construct
MALPVTALLLPLALLLHAARPEQKLISEEDLDIQMTQTTSSLSASLGDRVTISCRASQDISKYLNWYQQKPDGTVKLLIYHTSRLHSGVPSRFSGSGSGTDYSLTISNLEQEDIATYFCQQGNTLPYTFGGGTKLEITGGGGSGGGGSGGGGSEVKLQESGPGLVAPSQSLSVTCTVSGVSLPDYGVSWIRQPPRKGLEWLGVIWGSETTYYNSALKSRLTIIKDNSKSQVFLKMNSLQTDDTAIYYCAKHYYYGGSYAMDYWGQGTSVTVSSTTTPAPRPPTPAPTIASQPLSLRPEACFMYVAAAAFVLLFFVGCGVLLSKRKRKHMKLLSSIEQACDICRLKKLKCSKEKPKCAKCLKNNWECRYSPKTKRSPLTRAHLTEVESRLERLEQLFLLIFPREDLDMILKMDSLQDIKALLTGLFVQDNVNKDAVTDRLASVETDMPLTLRQHRISATSSSEESSNKGQRQLTVSAAAGGSGGSGGSDALDDFDLDMLGSDALDDFDLDMLGSDALDDFDLDMLGSDALDDFDLDMLGS

SEQ ID NO: 130 - protein, 832 aa, Artificial sequence
  Synthetic construct
MALPVTALLLPLALLLHAARPEQKLISEEDLDIQMTQTTSSLSASLGDRVTISCRASQDISKYLNWYQQKPDGTVKLLIYHTSRLHSGVPSRFSGSGSGTDYSLTISNLEQEDIATYFCQQGNTLPYTFGGGTKLEITGGGGSGGGGSGGGGSEVKLQESGPGLVAPSQSLSVTCTVSGVSLPDYGVSWIRQPPRKGLEWLGVIWGSETTYYNSALKSRLTIIKDNSKSQVFLKMNSLQTDDTAIYYCAKHYYYGGSYAMDYWGQGTSVTVSSTTTPAPRPPTPAPTIASQPLSLRPEACFMYVAAAAFVLLFFVGCGVLLSKRKRKHPKKKRKVSRPGERPFQCRICMRNFSQQTNLTRHTRTHTGEKPFQCRICMRNFSQKANLGVHLRTHTGSQKPFQCRICMRNFSDHSSLKRHTRTHTGEKPFQCRICMRNFSRADMLRRHLRTHTGSQKPFQCRICMRNFSEKQNLARHTRTHTGEKPFQCRICMRNFSDPSNLRRHLRTHLRDEFPTMVFPSGQISQASALAPAPPQVLPQAPAPAPAPAMVSALAQAPAPVPVLAPGPPQAVAPPAPKPTQAGEGTLSEALLQLQFDDEDLGALLGNSTDPAVFTDLASVDNSEFQQLLNQGIPVAPHTTEPMLMEYPEAITRLVTGAQRPPDPAPAPLGAPGLPNGLLSGDEDFSSIADMDFSALLSQISSSGQGGGGSGFSVDTSALLDLFSPSVTVPDMSLPDLDSSLASIQELLSPQEPPRPPEAENSSPDSGKQLVHYTAQPLFLLDPGSVDTGSNDLPVLFELGEGSYFSEGDGFAEDPTISLLTGSEPPKAKDPTVS

SEQ ID NO: 131 - protein, 766 aa, Artificial sequence
  Synthetic construct
MALPVTALLLPLALLLHAARPEQKLISEEDLDIQMTQTTSSLSASLGDRVTISCRASQDISKYLNWYQQKPDGTVKLLIYHTSRLHSGVPSRFSGSGSGTDYSLTISNLEQEDIATYFCQQGNTLPYTFGGGTKLEITGGGGSGGGGSGGGGSEVKLQESGPGLVAPSQSLSVTCTVSGVSLPDYGVSWIRQPPRKGLEWLGVIWGSETTYYNSALKSRLTIIKDNSKSQVFLKMNSLQTDDTAIYYCAKHYYYGGSYAMDYWGQGTSVTVSSTTTPAPRPPTPAPTIASQPLSLRPEACFMYVAAAAFVLLFFVGCGVLLSKRKRKHPKKKRKVSRPGERPFQCRICMRNFSQQTNLTRHTRTHTGEKPFQCRICMRNFSQKANLGVHLRTHTGSQKPFQCRICMRNFSDHSSLKRHTRTHTGEKPFQCRICMRNFSRADMLRRHLRTHTGSQKPFQCRICMRNFSEKQNLARHTRTHTGEKPFQCRICMRNFSDPSNLRRHLRTHLRDEFPTMVFPSGQISQASALAPAPPQVLPQAPAPAPAPAMVSALAQAPAPVPVLAPGPPQAVAPPAPKPTQAGEGTLSEALLQLQFDDEDLGALLGNSTDPAVFTDLASVDNSEFQQLLNQGIPVAPHTTEPMLMEYPEAITRLVTGAQRPPDPAPAPLGAPGLPNGLLSGDEDFSSIADMDFSALLSQISSSGQGGGGSDQSTFDILQDLEFSSGSPGKETNESPWRSDLLIDENCLLSPLAGEDDSFLLEGNSNED

SEQ ID NO: 132 - protein, 832 aa, Artificial sequence
  Synthetic construct
MALPVTALLLPLALLLHAARPEQKLISEEDLDIQMTQTTSSLSASLGDRVTISCRASQDISKYLNWYQQKPDGTVKLLIYHTSRLHSGVPSRFSGSGSGTDYSLTISNLEQEDIATYFCQQGNTLPYTFGGGTKLEITGGGGSGGGGSGGGGSEVKLQESGPGLVAPSQSLSVTCTVSGVSLPDYGVSWIRQPPRKGLEWLGVIWGSETTYYNSALKSRLTIIKDNSKSQVFLKMNSLQTDDTAIYYCAKHYYYGGSYAMDYWGQGTSVTVSSTTTPAPRPPTPAPTIASQPLSLRPEACFMYVAAAAFVLLFFVGCGVLLSKRKRKHPKKKRKVSRPGERPFQCRICMRNFSRRHGLDRHTRTHTGEKPFQCRICMRNFSDHSSLKRHLRTHTGSQKPFQCRICMRNFSVRHNLTRHLRTHTGEKPFQCRICMRNFSDHSNLSRHLKTHTGSQKPFQCRICMRNFSQRSSLVRHLRTHTGEKPFQCRICMRNFSESGHLKRHLRTHLRDEFPTMVFPSGQISQASALAPAPPQVLPQAPAPAPAPAMVSALAQAPAPVPVLAPGPPQAVAPPAPKPTQAGEGTLSEALLQLQFDDEDLGALLGNSTDPAVFTDLASVDNSEFQQLLNQGIPVAPHTTEPMLMEYPEAITRLVTGAQRPPDPAPAPLGAPGLPNGLLSGDEDFSSIADMDFSALLSQISSSGQGGGGSGFSVDTSALLDLFSPSVTVPDMSLPDLDSSLASIQELLSPQEPPRPPEAENSSPDSGKQLVHYTAQPLFLLDPGSVDTGSNDLPVLFELGEGSYFSEGDGFAEDPTISLLTGSEPPKAKDPTVS

SEQ ID NO: 133 - protein, 766 aa, Artificial sequence
  Synthetic construct
MALPVTALLLPLALLLHAARPEQKLISEEDLDIQMTQTTSSLSASLGDRVTISCRASQDISKYLNWYQQKPDGTVKLLIYHTSRLHSGVPSRFSGSGSGTDYSLTISNLEQEDIATYFCQQGNTLPYTFGGGTKLEITGGGGSGGGGSGGGGSEVKLQESGPGLVAPSQSLSVTCTVSGVSLPDYGVSWIRQPPRKGLEWLGVIWGSETTYYNSALKSRLTIIKDNSKSQVFLKMNSLQTDDTAIYYCAKHYYYGGSYAMDYWGQGTSVTVSSTTTPAPRPPTPAPTIASQPLSLRPEACFMYVAAAAFVLLFFVGCGVLLSKRKRKHPKKKRKVSRPGERPFQCRICMRNFSRRHGLDRHTRTHTGEKPFQCRICMRNFSDHSSLKRHLRTHTGSQKPFQCRICMRNFSVRHNLTRHLRTHTGEKPFQCRICMRNFSDHSNLSRHLKTHTGSQKPFQCRICMRNFSQRSSLVRHLRTHTGEKPFQCRICMRNFSESGHLKRHLRTHLRDEFPTMVFPSGQISQASALAPAPPQVLPQAPAPAPAPAMVSALAQAPAPVPVLAPGPPQAVAPPAPKPTQAGEGTLSEALLQLQFDDEDLGALLGNSTDPAVFTDLASVDNSEFQQLLNQGIPVAPHTTEPMLMEYPEAITRLVTGAQRPPDPAPAPLGAPGLPNGLLSGDEDFSSIADMDFSALLSQISSSGQGGGGSDQSTFDILQDLEFSSGSPGKETNESPWRSDLLIDENCLLSPLAGEDDSFLLEGNSNED

SEQ ID NO: 134 - protein, 704 aa, Artificial sequence
  Synthetic construct
MALPVTALLLPLALLLHAARPEQKLISEEDLQVQLQQSGGGLVKPGGSLRLSCAASGFTFSSYAMHWVRQAPGKGLEWVAVISYDGSNKYYADSVKGRFTISRDNSKNTLYLQMDSLRAEDTAVYYCAKEGDSSRWSYDLWGRGTLVTVSSGGGGSGGGGSGGGGSQSALTQPASVSGSPGQSITISCTGTSSDVGGYNYVSWYQQHPGKAPKVMIYDVTNRPSGVSNRFSGSKSGNTASLTISGLQAEDEADYYCSSYTIASTLVVFGGGTKLTVLTTTPAPRPPTPAPTIASQPLSLRPEACFMYVAAAAFVLLFFVGCGVLLSKRKRKHPKKKRKVSRPGERPFQCRICMRNFSQQTNLTRHTRTHTGEKPFQCRICMRNFSQKANLGVHLRTHTGSQKPFQCRICMRNFSDHSSLKRHTRTHTGEKPFQCRICMRNFSRADMLRRHLRTHTGSQKPFQCRICMRNFSEKQNLARHTRTHTGEKPFQCRICMRNFSDPSNLRRHLRTHLRDEFPTMVFPSGQISQASALAPAPPQVLPQAPAPAPAPAMVSALAQAPAPVPVLAPGPPQAVAPPAPKPTQAGEGTLSEALLQLQFDDEDLGALLGNSTDPAVFTDLASVDNSEFQQLLNQGIPVAPHTTEPMLMEYPEAITRLVTGAQRPPDPAPAPLGAPGLPNGLLSGDEDFSSIADMDFSALLSQISS

SEQ ID NO: 135 - protein, 836 aa, Artificial sequence
  Synthetic construct
MALPVTALLLPLALLLHAARPEQKLISEEDLQVQLQQSGGGLVKPGGSLRLSCAASGFTFSSYAMHWVRQAPGKGLEWVAVISYDGSNKYYADSVKGRFTISRDNSKNTLYLQMDSLRAEDTAVYYCAKEGDSSRWSYDLWGRGTLVTVSSGGGGSGGGGSGGGGSQSALTQPASVSGSPGQSITISCTGTSSDVGGYNYVSWYQQHPGKAPKVMIYDVTNRPSGVSNRFSGSKSGNTASLTISGLQAEDEADYYCSSYTIASTLVVFGGGTKLTVLTTTPAPRPPTPAPTIASQPLSLRPEACFMYVAAAAFVLLFFVGCGVLLSKRKRKHPKKKRKVSRPGERPFQCRICMRNFSQQTNLTRHTRTHTGEKPFQCRICMRNFSQKANLGVHLRTHTGSQKPFQCRICMRNFSDHSSLKRHTRTHTGEKPFQCRICMRNFSRADMLRRHLRTHTGSQKPFQCRICMRNFSEKQNLARHTRTHTGEKPFQCRICMRNFSDPSNLRRHLRTHLRDEFPTMVFPSGQISQASALAPAPPQVLPQAPAPAPAPAMVSALAQAPAPVPVLAPGPPQAVAPPAPKPTQAGEGTLSEALLQLQFDDEDLGALLGNSTDPAVFTDLASVDNSEFQQLLNQGIPVAPHTTEPMLMEYPEAITRLVTGAQRPPDPAPAPLGAPGLPNGLLSGDEDFSSIADMDFSALLSQISSSGQGGGGSGFSVDTSALLDLFSPSVTVPDMSLPDLDSSLASIQELLSPQEPPRPPEAENSSPDSGKQLVHYTAQPLFLLDPGSVDTGSNDLPVLFELGEGSYFSEGDGFAEDPTISLLTGSEPPKAKDPTVS

SEQ ID NO: 136 - protein, 770 aa, Artificial sequence
  Synthetic construct
MALPVTALLLPLALLLHAARPEQKLISEEDLQVQLQQSGGGLVKPGGSLRLSCAASGFTFSSYAMHWVRQAPGKGLEWVAVISYDGSNKYYADSVKGRFTISRDNSKNTLYLQMDSLRAEDTAVYYCAKEGDSSRWSYDLWGRGTLVTVSSGGGGSGGGGSGGGGSQSALTQPASVSGSPGQSITISCTGTSSDVGGYNYVSWYQQHPGKAPKVMIYDVTNRPSGVSNRFSGSKSGNTASLTISGLQAEDEADYYCSSYTIASTLVVFGGGTKLTVLTTTPAPRPPTPAPTIASQPLSLRPEACFMYVAAAAFVLLFFVGCGVLLSKRKRKHPKKKRKVSRPGERPFQCRICMRNFSQQTNLTRHTRTHTGEKPFQCRICMRNFSQKANLGVHLRTHTGSQKPFQCRICMRNFSDHSSLKRHTRTHTGEKPFQCRICMRNFSRADMLRRHLRTHTGSQKPFQCRICMRNFSEKQNLARHTRTHTGEKPFQCRICMRNFSDPSNLRRHLRTHLRDEFPTMVFPSGQISQASALAPAPPQVLPQAPAPAPAPAMVSALAQAPAPVPVLAPGPPQAVAPPAPKPTQAGEGTLSEALLQLQFDDEDLGALLGNSTDPAVFTDLASVDNSEFQQLLNQGIPVAPHTTEPMLMEYPEAITRLVTGAQRPPDPAPAPLGAPGLPNGLLSGDEDFSSIADMDFSALLSQISSSGQGGGGSDQSTFDILQDLEFSSGSPGKETNESPWRSDLLIDENCLLSPLAGEDDSFLLEGNSNED

SEQ ID NO: 137 - protein, 701 aa, Artificial sequence
  Synthetic construct
MALPVTALLLPLALLLHAARPEQKLISEEDLQVQLQQSGGGLVKPGGSLRLSCAASGFTFSSYAMHWVRQAPGKGLEWVAVISYDGSNKYYADSVKGRFTISRDNSKNTLYLQMDSLRAEDTAVYYCAKEGDSSRWSYDLWGRGTLVTVSSGGGGSGGGGSGGGGSQSALTQPASVSGSPGQSITISCTGTSSDVGGYNYVSWYQQHPGKAPKVMIYDVTNRPSGVSNRFSGSKSGNTASLTISGLQAEDEADYYCSSYTIASTLVVFGGGTKLTVLTTTPAPRPPTPAPTIASQPLSLRPEACFMYVAAAAFVLLFFVGCGVLLSKRKRKHRRKKSRPGERPFQCRICMRNFSQQTNLTRHTRTHTGEKPFQCRICMRNFSQKANLGVHLRTHTGSQKPFQCRICMRNFSDHSSLKRHTRTHTGEKPFQCRICMRNFSRADMLRRHLRTHTGSQKPFQCRICMRNFSEKQNLARHTRTHTGEKPFQCRICMRNFSDPSNLRRHLRTHLRDEFPTMVFPSGQISQASALAPAPPQVLPQAPAPAPAPAMVSALAQAPAPVPVLAPGPPQAVAPPAPKPTQAGEGTLSEALLQLQFDDEDLGALLGNSTDPAVFTDLASVDNSEFQQLLNQGIPVAPHTTEPMLMEYPEAITRLVTGAQRPPDPAPAPLGAPGLPNGLLSGDEDFSSIADMDFSALLSQISS

SEQ ID NO: 138 - protein, 833 aa, Artificial sequence
  Synthetic construct
MALPVTALLLPLALLLHAARPEQKLISEEDLQVQLQQSGGGLVKPGGSLRLSCAASGFTFSSYAMHWVRQAPGKGLEWVAVISYDGSNKYYADSVKGRFTISRDNSKNTLYLQMDSLRAEDTAVYYCAKEGDSSRWSYDLWGRGTLVTVSSGGGGSGGGGSGGGGSQSALTQPASVSGSPGQSITISCTGTSSDVGGYNYVSWYQQHPGKAPKVMIYDVTNRPSGVSNRFSGSKSGNTASLTISGLQAEDEADYYCSSYTIASTLVVFGGGTKLTVLTTTPAPRPPTPAPTIASQPLSLRPEACFMYVAAAAFVLLFFVGCGVLLSKRKRKHRRKKSRPGERPFQCRICMRNFSQQTNLTRHTRTHTGEKPFQCRICMRNFSQKANLGVHLRTHTGSQKPFQCRICMRNFSDHSSLKRHTRTHTGEKPFQCRICMRNFSRADMLRRHLRTHTGSQKPFQCRICMRNFSEKQNLARHTRTHTGEKPFQCRICMRNFSDPSNLRRHLRTHLRDEFPTMVFPSGQISQASALAPAPPQVLPQAPAPAPAPAMVSALAQAPAPVPVLAPGPPQAVAPPAPKPTQAGEGTLSEALLQLQFDDEDLGALLGNSTDPAVFTDLASVDNSEFQQLLNQGIPVAPHTTEPMLMEYPEAITRLVTGAQRPPDPAPAPLGAPGLPNGLLSGDEDFSSIADMDFSALLSQISSSGQGGGGSGFSVDTSALLDLFSPSVTVPDMSLPDLDSSLASIQELLSPQEPPRPPEAENSSPDSGKQLVHYTAQPLFLLDPGSVDTGSNDLPVLFELGEGSYFSEGDGFAEDPTISLLTGSEPPKAKDPTVS

SEQ ID NO: 139 - protein, 767 aa, Artificial sequence
  Synthetic construct
MALPVTALLLPLALLLHAARPEQKLISEEDLQVQLQQSGGGLVKPGGSLRLSCAASGFTFSSYAMHWVRQAPGKGLEWVAVISYDGSNKYYADSVKGRFTISRDNSKNTLYLQMDSLRAEDTAVYYCAKEGDSSRWSYDLWGRGTLVTVSSGGGGSGGGGSGGGGSQSALTQPASVSGSPGQSITISCTGTSSDVGGYNYVSWYQQHPGKAPKVMIYDVTNRPSGVSNRFSGSKSGNTASLTISGLQAEDEADYYCSSYTIASTLVVFGGGTKLTVLTTTPAPRPPTPAPTIASQPLSLRPEACFMYVAAAAFVLLFFVGCGVLLSKRKRKHRRKKSRPGERPFQCRICMRNFSQQTNLTRHTRTHTGEKPFQCRICMRNFSQKANLGVHLRTHTGSQKPFQCRICMRNFSDHSSLKRHTRTHTGEKPFQCRICMRNFSRADMLRRHLRTHTGSQKPFQCRICMRNFSEKQNLARHTRTHTGEKPFQCRICMRNFSDPSNLRRHLRTHLRDEFPTMVFPSGQISQASALAPAPPQVLPQAPAPAPAPAMVSALAQAPAPVPVLAPGPPQAVAPPAPKPTQAGEGTLSEALLQLQFDDEDLGALLGNSTDPAVFTDLASVDNSEFQQLLNQGIPVAPHTTEPMLMEYPEAITRLVTGAQRPPDPAPAPLGAPGLPNGLLSGDEDFSSIADMDFSALLSQISSSGQGGGGSDQSTFDILQDLEFSSGSPGKETNESPWRSDLLIDENCLLSPLAGEDDSFLLEGNSNED

SEQ ID NO: 140 - protein, 704 aa, Artificial sequence
  Synthetic construct
MALPVTALLLPLALLLHAARPEQKLISEEDLQVQLQQSGGGLVKPGGSLRLSCAASGFTFSSYAMHWVRQAPGKGLEWVAVISYDGSNKYYADSVKGRFTISRDNSKNTLYLQMDSLRAEDTAVYYCAKEGDSSRWSYDLWGRGTLVTVSSGGGGSGGGGSGGGGSQSALTQPASVSGSPGQSITISCTGTSSDVGGYNYVSWYQQHPGKAPKVMIYDVTNRPSGVSNRFSGSKSGNTASLTISGLQAEDEADYYCSSYTIASTLVVFGGGTKLTVLTTTPAPRPPTPAPTIASQPLSLRPEACFMYVAAAAFVLLFFVGCGVLLSKRKRKHPKKKRKVSRPGERPFQCRICMRNFSRRHGLDRHTRTHTGEKPFQCRICMRNFSDHSSLKRHLRTHTGSQKPFQCRICMRNFSVRHNLTRHLRTHTGEKPFQCRICMRNFSDHSNLSRHLKTHTGSQKPFQCRICMRNFSQRSSLVRHLRTHTGEKPFQCRICMRNFSESGHLKRHLRTHLRDEFPTMVFPSGQISQASALAPAPPQVLPQAPAPAPAPAMVSALAQAPAPVPVLAPGPPQAVAPPAPKPTQAGEGTLSEALLQLQFDDEDLGALLGNSTDPAVFTDLASVDNSEFQQLLNQGIPVAPHTTEPMLMEYPEAITRLVTGAQRPPDPAPAPLGAPGLPNGLLSGDEDFSSIADMDFSALLSQISS

SEQ ID NO: 141 - protein, 836 aa, Artificial sequence
  Synthetic construct
MALPVTALLLPLALLLHAARPEQKLISEEDLQVQLQQSGGGLVKPGGSLRLSCAASGFTFSSYAMHWVRQAPGKGLEWVAVISYDGSNKYYADSVKGRFTISRDNSKNTLYLQMDSLRAEDTAVYYCAKEGDSSRWSYDLWGRGTLVTVSSGGGGSGGGGSGGGGSQSALTQPASVSGSPGQSITISCTGTSSDVGGYNYVSWYQQHPGKAPKVMIYDVTNRPSGVSNRFSGSKSGNTASLTISGLQAEDEADYYCSSYTIASTLVVFGGGTKLTVLTTTPAPRPPTPAPTIASQPLSLRPEACFMYVAAAAFVLLFFVGCGVLLSKRKRKHPKKKRKVSRPGERPFQCRICMRNFSRRHGLDRHTRTHTGEKPFQCRICMRNFSDHSSLKRHLRTHTGSQKPFQCRICMRNFSVRHNLTRHLRTHTGEKPFQCRICMRNFSDHSNLSRHLKTHTGSQKPFQCRICMRNFSQRSSLVRHLRTHTGEKPFQCRICMRNFSESGHLKRHLRTHLRDEFPTMVFPSGQISQASALAPAPPQVLPQAPAPAPAPAMVSALAQAPAPVPVLAPGPPQAVAPPAPKPTQAGEGTLSEALLQLQFDDEDLGALLGNSTDPAVFTDLASVDNSEFQQLLNQGIPVAPHTTEPMLMEYPEAITRLVTGAQRPPDPAPAPLGAPGLPNGLLSGDEDFSSIADMDFSALLSQISSSGQGGGGSGFSVDTSALLDLFSPSVTVPDMSLPDLDSSLASIQELLSPQEPPRPPEAENSSPDSGKQLVHYTAQPLFLLDPGSVDTGSNDLPVLFELGEGSYFSEGDGFAEDPTISLLTGSEPPKAKDPTVS

SEQ ID NO: 142 - protein, 770 aa, Artificial sequence
  Synthetic construct
MALPVTALLLPLALLLHAARPEQKLISEEDLQVQLQQSGGGLVKPGGSLRLSCAASGFTFSSYAMHWVRQAPGKGLEWVAVISYDGSNKYYADSVKGRFTISRDNSKNTLYLQMDSLRAEDTAVYYCAKEGDSSRWSYDLWGRGTLVTVSSGGGGSGGGGSGGGGSQSALTQPASVSGSPGQSITISCTGTSSDVGGYNYVSWYQQHPGKAPKVMIYDVTNRPSGVSNRFSGSKSGNTASLTISGLQAEDEADYYCSSYTIASTLVVFGGGTKLTVLTTTPAPRPPTPAPTIASQPLSLRPEACFMYVAAAAFVLLFFVGCGVLLSKRKRKHPKKKRKVSRPGERPFQCRICMRNFSRRHGLDRHTRTHTGEKPFQCRICMRNFSDHSSLKRHLRTHTGSQKPFQCRICMRNFSVRHNLTRHLRTHTGEKPFQCRICMRNFSDHSNLSRHLKTHTGSQKPFQCRICMRNFSQRSSLVRHLRTHTGEKPFQCRICMRNFSESGHLKRHLRTHLRDEFPTMVFPSGQISQASALAPAPPQVLPQAPAPAPAPAMVSALAQAPAPVPVLAPGPPQAVAPPAPKPTQAGEGTLSEALLQLQFDDEDLGALLGNSTDPAVFTDLASVDNSEFQQLLNQGIPVAPHTTEPMLMEYPEAITRLVTGAQRPPDPAPAPLGAPGLPNGLLSGDEDFSSIADMDFSALLSQISSSGQGGGGSDQSTFDILQDLEFSSGSPGKETNESPWRSDLLIDENCLLSPLAGEDDSFLLEGNSNED

SEQ ID NO: 143 - protein, 701 aa, Artificial sequence
  Synthetic construct
MALPVTALLLPLALLLHAARPEQKLISEEDLQVQLQQSGGGLVKPGGSLRLSCAASGFTFSSYAMHWVRQAPGKGLEWVAVISYDGSNKYYADSVKGRFTISRDNSKNTLYLQMDSLRAEDTAVYYCAKEGDSSRWSYDLWGRGTLVTVSSGGGGSGGGGSGGGGSQSALTQPASVSGSPGQSITISCTGTSSDVGGYNYVSWYQQHPGKAPKVMIYDVTNRPSGVSNRFSGSKSGNTASLTISGLQAEDEADYYCSSYTIASTLVVFGGGTKLTVLTTTPAPRPPTPAPTIASQPLSLRPEACFMYVAAAAFVLLFFVGCGVLLSKRKRKHRRKKSRPGERPFQCRICMRNFSRRHGLDRHTRTHTGEKPFQCRICMRNFSDHSSLKRHLRTHTGSQKPFQCRICMRNFSVRHNLTRHLRTHTGEKPFQCRICMRNFSDHSNLSRHLKTHTGSQKPFQCRICMRNFSQRSSLVRHLRTHTGEKPFQCRICMRNFSESGHLKRHLRTHLRDEFPTMVFPSGQISQASALAPAPPQVLPQAPAPAPAPAMVSALAQAPAPVPVLAPGPPQAVAPPAPKPTQAGEGTLSEALLQLQFDDEDLGALLGNSTDPAVFTDLASVDNSEFQQLLNQGIPVAPHTTEPMLMEYPEAITRLVTGAQRPPDPAPAPLGAPGLPNGLLSGDEDFSSIADMDFSALLSQISS

SEQ ID NO: 144 - protein, 833 aa, Artificial sequence
  Synthetic construct
MALPVTALLLPLALLLHAARPEQKLISEEDLQVQLQQSGGGLVKPGGSLRLSCAASGFTFSSYAMHWVRQAPGKGLEWVAVISYDGSNKYYADSVKGRFTISRDNSKNTLYLQMDSLRAEDTAVYYCAKEGDSSRWSYDLWGRGTLVTVSSGGGGSGGGGSGGGGSQSALTQPASVSGSPGQSITISCTGTSSDVGGYNYVSWYQQHPGKAPKVMIYDVTNRPSGVSNRFSGSKSGNTASLTISGLQAEDEADYYCSSYTIASTLVVFGGGTKLTVLTTTPAPRPPTPAPTIASQPLSLRPEACFMYVAAAAFVLLFFVGCGVLLSKRKRKHRRKKSRPGERPFQCRICMRNFSRRHGLDRHTRTHTGEKPFQCRICMRNFSDHSSLKRHLRTHTGSQKPFQCRICMRNFSVRHNLTRHLRTHTGEKPFQCRICMRNFSDHSNLSRHLKTHTGSQKPFQCRICMRNFSQRSSLVRHLRTHTGEKPFQCRICMRNFSESGHLKRHLRTHLRDEFPTMVFPSGQISQASALAPAPPQVLPQAPAPAPAPAMVSALAQAPAPVPVLAPGPPQAVAPPAPKPTQAGEGTLSEALLQLQFDDEDLGALLGNSTDPAVFTDLASVDNSEFQQLLNQGIPVAPHTTEPMLMEYPEAITRLVTGAQRPPDPAPAPLGAPGLPNGLLSGDEDFSSIADMDFSALLSQISSSGQGGGGSGFSVDTSALLDLFSPSVTVPDMSLPDLDSSLASIQELLSPQEPPRPPEAENSSPDSGKQLVHYTAQPLFLLDPGSVDTGSNDLPVLFELGEGSYFSEGDGFAEDPTISLLTGSEPPKAKDPTVS

SEQ ID NO: 145 - protein, 767 aa, Artificial sequence
  Synthetic construct
MALPVTALLLPLALLLHAARPEQKLISEEDLQVQLQQSGGGLVKPGGSLRLSCAASGFTFSSYAMHWVRQAPGKGLEWVAVISYDGSNKYYADSVKGRFTISRDNSKNTLYLQMDSLRAEDTAVYYCAKEGDSSRWSYDLWGRGTLVTVSSGGGGSGGGGSGGGGSQSALTQPASVSGSPGQSITISCTGTSSDVGGYNYVSWYQQHPGKAPKVMIYDVTNRPSGVSNRFSGSKSGNTASLTISGLQAEDEADYYCSSYTIASTLVVFGGGTKLTVLTTTPAPRPPTPAPTIASQPLSLRPEACFMYVAAAAFVLLFFVGCGVLLSKRKRKHRRKKSRPGERPFQCRICMRNFSRRHGLDRHTRTHTGEKPFQCRICMRNFSDHSSLKRHLRTHTGSQKPFQCRICMRNFSVRHNLTRHLRTHTGEKPFQCRICMRNFSDHSNLSRHLKTHTGSQKPFQCRICMRNFSQRSSLVRHLRTHTGEKPFQCRICMRNFSESGHLKRHLRTHLRDEFPTMVFPSGQISQASALAPAPPQVLPQAPAPAPAPAMVSALAQAPAPVPVLAPGPPQAVAPPAPKPTQAGEGTLSEALLQLQFDDEDLGALLGNSTDPAVFTDLASVDNSEFQQLLNQGIPVAPHTTEPMLMEYPEAITRLVTGAQRPPDPAPAPLGAPGLPNGLLSGDEDFSSIADMDFSALLSQISSSGQGGGGSDQSTFDILQDLEFSSGSPGKETNESPWRSDLLIDENCLLSPLAGEDDSFLLEGNSNED

SEQ ID NO: 146 - DNA, 2100 bp, Artificial sequence
  Synthetic construct
atggccttaccagtgaccgccttgctcctgccgctggccttgctgctccacgccgccaggccggagcagaagctgatcagcgaggaggacctggacatccagatgacacagactacatcctccctgtctgcctctctgggagacagagtcaccatcagttgcagggcaagtcaggacattagtaaatatttaaattggtatcagcagaaaccagatggaactgttaaactcctgatctaccatacatcaagattacactcaggagtcccatcaaggttcagtggcagtgggtctggaacagattattctctcaccattagcaacctggagcaagaagatattgccacttacttttgccaacagggtaatacgcttccgtacacgttcggaggggggaccaagctggagatcacaggtggcggtggctcgggcggtggtgggtcgggtggcggcggatctgaggtgaaactgcaggagtcaggacctggcctggtggcgccctcacagagcctgtccgtcacatgcactgtctcaggggtctcattacccgactatggtgtaagctggattcgccagcctccacgaaagggtctggagtggctgggagtaatatggggtagtgaaaccacatactataattcagctctcaaatccagactgaccatcatcaaggacaactccaagagccaagttttcttaaaaatgaacagtctgcaaactgatgacacagccatttactactgtgccaaacattattactacggtggtagctatgctatggactactggggccaaggaacctcagtcaccgtctcctcaaccacgacgccagcgccgcgaccaccaacaccggcgcccaccatcgcgtcgcagcccctgtccctgcgcccagaggcgtgctttatgtacgtggcagccgcggcatttgtacttctgtttttcgtggggtgcggtgtgcttctcagcaagaggaaacggaagcaccccaagaaaaagaggaaggtgtctagaccaggcgaacgaccgtttcaatgccggatatgtatgaggaacttctcccagcagaccaatctcacgcggcacacccgaacacatacaggagaaaagccattccaatgtcgaatttgtatgcgcaatttttcacagaaggctaacctcggcgttcacctccgcacacatactggttcacagaagccctttcagtgcaggatttgtatgcgcaactttagcgatcactcatctctgaaacgccacactagaacgcatacaggtgagaagcctttccagtgtcgcatctgtatgcggaacttcagccgagcggatatgcttagacgccatttgcgaactcacaccggttctcaaaaaccttttcagtgccgaatttgtatgcgcaacttcagcgagaaacagaacctggcacgccacacgcgcacgcacaccggggaaaaaccgtttcaatgtcgaatctgcatgcgcaattttagcgacccctctaatcttaggaggcatctgcgcacacacttgcgggatgagtttcccaccatggtgtttccttctgggcagatcagccaggcctcggccttggccccggcccctccccaagtcctgccccaggctccagcccctgcccctgctccagccatggtatcagctctggcccaggccccagcccctgtcccagtcctagccccaggccctcctcaggctgtggccccacctgcccccaagcccacccaggctggggaaggaacgctgtcagaggccctgctgcagctgcagtttgatgatgaagacctgggggccttgcttggcaacagcacagacccagctgtgttcacagacctggcatccgtcgacaactccgagtttcagcagctgctgaaccagggcatacctgtggccccccacacaactgagcccatgctgatggagtaccctgaggctataactcgcctagtgacaggggcccagaggccccccgacccagctcctgctccactgggggccccggggctccccaatggcctcctttcaggagatgaagacttctcctccattgcggacatggacttctcagccctgctgagtcagatcagctcc

SEQ ID NO: 147 - DNA, 1686 bp, Artificial sequence
  Synthetic construct
atggccttaccagtgaccgccttgctcctgccgctggccttgctgctccacgccgccaggccggagcagaagctgatcagcgaggaggacctggacatccagatgacacagactacatcctccctgtctgcctctctgggagacagagtcaccatcagttgcagggcaagtcaggacattagtaaatatttaaattggtatcagcagaaaccagatggaactgttaaactcctgatctaccatacatcaagattacactcaggagtcccatcaaggttcagtggcagtgggtctggaacagattattctctcaccattagcaacctggagcaagaagatattgccacttacttttgccaacagggtaatacgcttccgtacacgttcggaggggggaccaagctggagatcacaggtggcggtggctcgggcggtggtgggtcgggtggcggcggatctgaggtgaaactgcaggagtcaggacctggcctggtggcgccctcacagagcctgtccgtcacatgcactgtctcaggggtctcattacccgactatggtgtaagctggattcgccagcctccacgaaagggtctggagtggctgggagtaatatggggtagtgaaaccacatactataattcagctctcaaatccagactgaccatcatcaaggacaactccaagagccaagttttcttaaaaatgaacagtctgcaaactgatgacacagccatttactactgtgccaaacattattactacggtggtagctatgctatggactactggggccaaggaacctcagtcaccgtctcctcaaccacgacgccagcgccgcgaccaccaacaccggcgcccaccatcgcgtcgcagcccctgtccctgcgcccagaggcgtgctttatgtacgtggcagccgcggcatttgtacttctgtttttcgtggggtgcggtgtgcttctcagcaagaggaaacggaagcaccccaagaaaaagaggaaggtgtctagaccaggcgaacgaccgtttcaatgccggatatgtatgaggaacttctcccagcagaccaatctcacgcggcacacccgaacacatacaggagaaaagccattccaatgtcgaatttgtatgcgcaatttttcacagaaggctaacctcggcgttcacctccgcacacatactggttcacagaagccctttcagtgcaggatttgtatgcgcaactttagcgatcactcatctctgaaacgccacactagaacgcatacaggtgagaagcctttccagtgtcgcatctgtatgcggaacttcagccgagcggatatgcttagacgccatttgcgaactcacaccggttctcaaaaaccttttcagtgccgaatttgtatgcgcaacttcagcgagaaacagaacctggcacgccacacgcgcacgcacaccggggaaaaaccgtttcaatgtcgaatctgcatgcgcaattttagcgacccctctaatcttaggaggcatctgcgcacacacttgcgggatgccctggacgacttcgacctggatatgctgggcagcgacgccctggatgattttgatctggacatgctgggatctgacgctctggacgatttcgatctcgacatgttgggatcagatgcactggatgactttgacctggacatgctcggatcatga

SEQ ID NO: 148 - DNA, 2100 bp, Artificial sequence
  Synthetic construct
atggccttaccagtgaccgccttgctcctgccgctggccttgctgctccacgccgccaggccggagcagaagctgatcagcgaggaggacctggacatccagatgacacagactacatcctccctgtctgcctctctgggagacagagtcaccatcagttgcagggcaagtcaggacattagtaaatatttaaattggtatcagcagaaaccagatggaactgttaaactcctgatctaccatacatcaagattacactcaggagtcccatcaaggttcagtggcagtgggtctggaacagattattctctcaccattagcaacctggagcaagaagatattgccacttacttttgccaacagggtaatacgcttccgtacacgttcggaggggggaccaagctggagatcacaggtggcggtggctcgggcggtggtgggtcgggtggcggcggatctgaggtgaaactgcaggagtcaggacctggcctggtggcgccctcacagagcctgtccgtcacatgcactgtctcaggggtctcattacccgactatggtgtaagctggattcgccagcctccacgaaagggtctggagtggctgggagtaatatggggtagtgaaaccacatactataattcagctctcaaatccagactgaccatcatcaaggacaactccaagagccaagttttcttaaaaatgaacagtctgcaaactgatgacacagccatttactactgtgccaaacattattactacggtggtagctatgctatggactactggggccaaggaacctcagtcaccgtctcctcaaccacgacgccagcgccgcgaccaccaacaccggcgcccaccatcgcgtcgcagcccctgtccctgcgcccagaggcgtgctttatgtacgtggcagccgcggcatttgtacttctgtttttcgtggggtgcggtgtgcttctcagcaagaggaaacggaagcaccccaagaaaaagaggaaggtgtctagacccggagagcgcccattccagtgtcggatttgcatgcggaacttttcgagaagacacggcctggacagacatacccgtactcatacaggtgaaaaaccctttcagtgtcggatctgtatgcgaaatttctccgaccacagcagcctgaagagacatctacgtacccacaccggcagccagaagccatttcagtgtcggatctgtatgcggaacttctccgtgagacacaacctgaccagacatctacgtacgcacaccggagagaagccattccaatgccgaatatgcatgcgcaacttcagtgaccacagcaacctgagcagacacctaaaaacccacaccggttcccagaagccatttcagtgtcggatctgtatgcggaacttctcccagcgcagcagcctggtgagacatctacgtacgcacaccggagagaagccattccaatgccgaatatgcatgcgcaacttcagtgagagcggccacctgaagagacacctgcgtacgcacctgagggatgagtttcccaccatggtgtttccttctgggcagatcagccaggcctcggccttggccccggcccctccccaagtcctgccccaggctccagcccctgcccctgctccagccatggtatcagctctggcccaggccccagcccctgtcccagtcctagccccaggccctcctcaggctgtggccccacctgcccccaagcccacccaggctggggaaggaacgctgtcagaggccctgctgcagctgcagtttgatgatgaagacctgggggccttgcttggcaacagcacagacccagctgtgttcacagacctggcatccgtcgacaactccgagtttcagcagctgctgaaccagggcatacctgtggccccccacacaactgagcccatgctgatggagtaccctgaggctataactcgcctagtgacaggggcccagaggccccccgacccagctcctgctccactgggggccccggggctccccaatggcctcctttcaggagatgaagacttctcctccattgcggacatggacttctcagccctgctgagtcagatcagctcc

SEQ ID NO: 149 - DNA, 1683 bp, Artificial sequence
  Synthetic construct
atggccttaccagtgaccgccttgctcctgccgctggccttgctgctccacgccgccaggccggagcagaagctgatcagcgaggaggacctggacatccagatgacacagactacatcctccctgtctgcctctctgggagacagagtcaccatcagttgcagggcaagtcaggacattagtaaatatttaaattggtatcagcagaaaccagatggaactgttaaactcctgatctaccatacatcaagattacactcaggagtcccatcaaggttcagtggcagtgggtctggaacagattattctctcaccattagcaacctggagcaagaagatattgccacttacttttgccaacagggtaatacgcttccgtacacgttcggaggggggaccaagctggagatcacaggtggcggtggctcgggcggtggtgggtcgggtggcggcggatctgaggtgaaactgcaggagtcaggacctggcctggtggcgccctcacagagcctgtccgtcacatgcactgtctcaggggtctcattacccgactatggtgtaagctggattcgccagcctccacgaaagggtctggagtggctgggagtaatatggggtagtgaaaccacatactataattcagctctcaaatccagactgaccatcatcaaggacaactccaagagccaagttttcttaaaaatgaacagtctgcaaactgatgacacagccatttactactgtgccaaacattattactacggtggtagctatgctatggactactggggccaaggaacctcagtcaccgtctcctcaaccacgacgccagcgccgcgaccaccaacaccggcgcccaccatcgcgtcgcagcccctgtccctgcgcccagaggcgtgctttatgtacgtggcagccgcggcatttgtacttctgtttttcgtggggtgcggtgtgcttctcagcaagaggaaacggaagcaccccaagaaaaagaggaaggtgtctagacccggagagcgcccattccagtgtcggatttgcatgcggaacttttcgagaagacacggcctggacagacatacccgtactcatacaggtgaaaaaccctttcagtgtcggatctgtatgcgaaatttctccgaccacagcagcctgaagagacatctacgtacccacaccggcagccagaagccatttcagtgtcggatctgtatgcggaacttctccgtgagacacaacctgaccagacatctacgtacgcacaccggagagaagccattccaatgccgaatatgcatgcgcaacttcagtgaccacagcaacctgagcagacacctaaaaacccacaccggttcccagaagccatttcagtgtcggatctgtatgcggaacttctcccagcgcagcagcctggtgagacatctacgtacgcacaccggagagaagccattccaatgccgaatatgcatgcgcaacttcagtgagagcggccacctgaagagacacctgcgtacgcacctgagggatgccctggacgacttcgacctggatatgctgggcagcgacgccctggatgattttgatctggacatgctgggatctgacgctctggacgatttcgatctcgacatgttgggatcagatgcactggatgactttgacctggacatgctcggatca

SEQ ID NO: 150 - DNA, 2034 bp, Artificial sequence
  Synthetic construct
atggccttaccagtgaccgccttgctcctgccgctggccttgctgctccacgccgccaggccggagcagaagctgatcagcgaggaggacctggacatccagatgacacagactacatcctccctgtctgcctctctgggagacagagtcaccatcagttgcagggcaagtcaggacattagtaaatatttaaattggtatcagcagaaaccagatggaactgttaaactcctgatctaccatacatcaagattacactcaggagtcccatcaaggttcagtggcagtgggtctggaacagattattctctcaccattagcaacctggagcaagaagatattgccacttacttttgccaacagggtaatacgcttccgtacacgttcggaggggggaccaagctggagatcacaggtggcggtggctcgggcggtggtgggtcgggtggcggcggatctgaggtgaaactgcaggagtcaggacctggcctggtggcgccctcacagagcctgtccgtcacatgcactgtctcaggggtctcattacccgactatggtgtaagctggattcgccagcctccacgaaagggtctggagtggctgggagtaatatggggtagtgaaaccacatactataattcagctctcaaatccagactgaccatcatcaaggacaactccaagagccaagttttcttaaaaatgaacagtctgcaaactgatgacacagccatttactactgtgccaaacattattactacggtggtagctatgctatggactactggggccaaggaacctcagtcaccgtctcctcaaccacgacgccagcgccgcgaccaccaacaccggcgcccaccatcgcgtcgcagcccctgtccctgcgcccagaggcgtgctttatgtacgtggcagccgcggcatttgtacttctgtttttcgtggggtgcggtgtgcttctcagcaagaggaaacggaagcacatgaagctgctgagcagcatcgagcaggcctgtgacatctgccggctgaagaaactgaagtgcagcaaagaaaagcccaagtgcgccaagtgcctgaagaacaactgggagtgccggtacagccccaagaccaagagaagccccctgaccagagcccacctgaccgaggtggaaagccggctggaaagactggaacagctgtttctgctgatcttcccacgcgaggacctggacatgatcctgaagatggacagcctgcaggacatcaaggccctgctgaccggcctgttcgtgcaggacaacgtgaacaaggacgccgtgaccgacagactggccagcgtggaaaccgacatgcccctgaccctgcggcagcacagaatcagcgccaccagcagcagcgaggaaagcagcaacaagggccagcggcagctgacagtgtctgctgctgcaggcggaagcggaggctctggcggatctgatgagtttcccaccatggtgtttccttctgggcagatcagccaggcctcggccttggccccggcccctccccaagtcctgccccaggctccagcccctgcccctgctccagccatggtatcagctctggcccaggccccagcccctgtcccagtcctagccccaggccctcctcaggctgtggccccacctgcccccaagcccacccaggctggggaaggaacgctgtcagaggccctgctgcagctgcagtttgatgatgaagacctgggggccttgcttggcaacagcacagacccagctgtgttcacagacctggcatccgtcgacaactccgagtttcagcagctgctgaaccagggcatacctgtggccccccacacaactgagcccatgctgatggagtaccctgaggctataactcgcctagtgacaggggcccagaggccccccgacccagctcctgctccactgggggccccggggctccccaatggcctcctttcaggagatgaagacttctcctccattgcggacatggacttctcagccctgctgagtcagatcagctcc

SEQ ID NO: 151 - DNA, 1617 bp, Artificial sequence
  Synthetic construct
atggccttaccagtgaccgccttgctcctgccgctggccttgctgctccacgccgccaggccggagcagaagctgatcagcgaggaggacctggacatccagatgacacagactacatcctccctgtctgcctctctgggagacagagtcaccatcagttgcagggcaagtcaggacattagtaaatatttaaattggtatcagcagaaaccagatggaactgttaaactcctgatctaccatacatcaagattacactcaggagtcccatcaaggttcagtggcagtgggtctggaacagattattctctcaccattagcaacctggagcaagaagatattgccacttacttttgccaacagggtaatacgcttccgtacacgttcggaggggggaccaagctggagatcacaggtggcggtggctcgggcggtggtgggtcgggtggcggcggatctgaggtgaaactgcaggagtcaggacctggcctggtggcgccctcacagagcctgtccgtcacatgcactgtctcaggggtctcattacccgactatggtgtaagctggattcgccagcctccacgaaagggtctggagtggctgggagtaatatggggtagtgaaaccacatactataattcagctctcaaatccagactgaccatcatcaaggacaactccaagagccaagttttcttaaaaatgaacagtctgcaaactgatgacacagccatttactactgtgccaaacattattactacggtggtagctatgctatggactactggggccaaggaacctcagtcaccgtctcctcaaccacgacgccagcgccgcgaccaccaacaccggcgcccaccatcgcgtcgcagcccctgtccctgcgcccagaggcgtgctttatgtacgtggcagccgcggcatttgtacttctgtttttcgtggggtgcggtgtgcttctcagcaagaggaaacggaagcacatgaagctgctgagcagcatcgagcaggcctgtgacatctgccggctgaagaaactgaagtgcagcaaagaaaagcccaagtgcgccaagtgcctgaagaacaactgggagtgccggtacagccccaagaccaagagaagccccctgaccagagcccacctgaccgaggtggaaagccggctggaaagactggaacagctgtttctgctgatcttcccacgcgaggacctggacatgatcctgaagatggacagcctgcaggacatcaaggccctgctgaccggcctgttcgtgcaggacaacgtgaacaaggacgccgtgaccgacagactggccagcgtggaaaccgacatgcccctgaccctgcggcagcacagaatcagcgccaccagcagcagcgaggaaagcagcaacaagggccagcggcagctgacagtgtctgctgctgcaggcggaagcggaggctctggcggatctgatgccctggacgacttcgacctggatatgctgggcagcgacgccctggatgattttgatctggacatgctgggatctgacgctctggacgatttcgatctcgacatgttgggatcagatgcactggatgactttgacctggacatgctcggatca

SEQ ID NO: 152 - DNA, 2496 bp, Artificial sequence
  Synthetic construct
atggccttaccagtgaccgccttgctcctgccgctggccttgctgctccacgccgccaggccggagcagaagctgatcagcgaggaggacctggacatccagatgacacagactacatcctccctgtctgcctctctgggagacagagtcaccatcagttgcagggcaagtcaggacattagtaaatatttaaattggtatcagcagaaaccagatggaactgttaaactcctgatctaccatacatcaagattacactcaggagtcccatcaaggttcagtggcagtgggtctggaacagattattctctcaccattagcaacctggagcaagaagatattgccacttacttttgccaacagggtaatacgcttccgtacacgttcggaggggggaccaagctggagatcacaggtggcggtggctcgggcggtggtgggtcgggtggcggcggatctgaggtgaaactgcaggagtcaggacctggcctggtggcgccctcacagagcctgtccgtcacatgcactgtctcaggggtctcattacccgactatggtgtaagctggattcgccagcctccacgaaagggtctggagtggctgggagtaatatggggtagtgaaaccacatactataattcagctctcaaatccagactgaccatcatcaaggacaactccaagagccaagttttcttaaaaatgaacagtctgcaaactgatgacacagccatttactactgtgccaaacattattactacggtggtagctatgctatggactactggggccaaggaacctcagtcaccgtctcctcaaccacgacgccagcgccgcgaccaccaacaccggcgcccaccatcgcgtcgcagcccctgtccctgcgcccagaggcgtgctttatgtacgtggcagccgcggcatttgtacttctgtttttcgtggggtgcggtgtgcttctcagcaagaggaaacggaagcaccccaagaaaaagaggaaggtgtctagaccaggcgaacgaccgtttcaatgccggatatgtatgaggaacttctcccagcagaccaatctcacgcggcacacccgaacacatacaggagaaaagccattccaatgtcgaatttgtatgcgcaatttttcacagaaggctaacctcggcgttcacctccgcacacatactggttcacagaagccctttcagtgcaggatttgtatgcgcaactttagcgatcactcatctctgaaacgccacactagaacgcatacaggtgagaagcctttccagtgtcgcatctgtatgcggaacttcagccgagcggatatgcttagacgccatttgcgaactcacaccggttctcaaaaaccttttcagtgccgaatttgtatgcgcaacttcagcgagaaacagaacctggcacgccacacgcgcacgcacaccggggaaaaaccgtttcaatgtcgaatctgcatgcgcaattttagcgacccctctaatcttaggaggcatctgcgcacacacttgcgggatgagtttcccaccatggtgtttccttctgggcagatcagccaggcctcggccttggccccggcccctccccaagtcctgccccaggctccagcccctgcccctgctccagccatggtatcagctctggcccaggccccagcccctgtcccagtcctagccccaggccctcctcaggctgtggccccacctgcccccaagcccacccaggctggggaaggaacgctgtcagaggccctgctgcagctgcagtttgatgatgaagacctgggggccttgcttggcaacagcacagacccagctgtgttcacagacctggcatccgtcgacaactccgagtttcagcagctgctgaaccagggcatacctgtggccccccacacaactgagcccatgctgatggagtaccctgaggctataactcgcctagtgacaggggcccagaggccccccgacccagctcctgctccactgggggccccggggctccccaatggcctcctttcaggagatgaagacttctcctccattgcggacatggacttctcagccctgctgagtcagatcagctccagtgggcagggaggaggtggaagcggcttcagcgtggacaccagtgccctgctggacctgttcagcccctcggtgaccgtgcccgacatgagcctgcctgaccttgacagcagcctggccagtatccaagagctcctgtctccccaggagccccccaggcctcccgaggcagagaacagcagcccggattcagggaagcagctggtgcactacacagcgcagccgctgttcctgctggaccccggctccgtggacaccgggagcaacgacctgccggtgctgtttgagctgggagagggctcctacttctccgaaggggacggcttcgccgaggaccccaccatctccctgctgacaggctcggagcctcccaaagccaaggaccccactgtctcc

SEQ ID NO: 153 - DNA, 2298 bp, Artificial sequence
  Synthetic construct
atggccttaccagtgaccgccttgctcctgccgctggccttgctgctccacgccgccaggccggagcagaagctgatcagcgaggaggacctggacatccagatgacacagactacatcctccctgtctgcctctctgggagacagagtcaccatcagttgcagggcaagtcaggacattagtaaatatttaaattggtatcagcagaaaccagatggaactgttaaactcctgatctaccatacatcaagattacactcaggagtcccatcaaggttcagtggcagtgggtctggaacagattattctctcaccattagcaacctggagcaagaagatattgccacttacttttgccaacagggtaatacgcttccgtacacgttcggaggggggaccaagctggagatcacaggtggcggtggctcgggcggtggtgggtcgggtggcggcggatctgaggtgaaactgcaggagtcaggacctggcctggtggcgccctcacagagcctgtccgtcacatgcactgtctcaggggtctcattacccgactatggtgtaagctggattcgccagcctccacgaaagggtctggagtggctgggagtaatatggggtagtgaaaccacatactataattcagctctcaaatccagactgaccatcatcaaggacaactccaagagccaagttttcttaaaaatgaacagtctgcaaactgatgacacagccatttactactgtgccaaacattattactacggtggtagctatgctatggactactggggccaaggaacctcagtcaccgtctcctcaaccacgacgccagcgccgcgaccaccaacaccggcgcccaccatcgcgtcgcagcccctgtccctgcgcccagaggcgtgctttatgtacgtggcagccgcggcatttgtacttctgtttttcgtggggtgcggtgtgcttctcagcaagaggaaacggaagcaccccaagaaaaagaggaaggtgtctagaccaggcgaacgaccgtttcaatgccggatatgtatgaggaacttctcccagcagaccaatctcacgcggcacacccgaacacatacaggagaaaagccattccaatgtcgaatttgtatgcgcaatttttcacagaaggctaacctcggcgttcacctccgcacacatactggttcacagaagccctttcagtgcaggatttgtatgcgcaactttagcgatcactcatctctgaaacgccacactagaacgcatacaggtgagaagcctttccagtgtcgcatctgtatgcggaacttcagccgagcggatatgcttagacgccatttgcgaactcacaccggttctcaaaaaccttttcagtgccgaatttgtatgcgcaacttcagcgagaaacagaacctggcacgccacacgcgcacgcacaccggggaaaaaccgtttcaatgtcgaatctgcatgcgcaattttagcgacccctctaatcttaggaggcatctgcgcacacacttgcgggatgagtttcccaccatggtgtttccttctgggcagatcagccaggcctcggccttggccccggcccctccccaagtcctgccccaggctccagcccctgcccctgctccagccatggtatcagctctggcccaggccccagcccctgtcccagtcctagccccaggccctcctcaggctgtggccccacctgcccccaagcccacccaggctggggaaggaacgctgtcagaggccctgctgcagctgcagtttgatgatgaagacctgggggccttgcttggcaacagcacagacccagctgtgttcacagacctggcatccgtcgacaactccgagtttcagcagctgctgaaccagggcatacctgtggccccccacacaactgagcccatgctgatggagtaccctgaggctataactcgcctagtgacaggggcccagaggccccccgacccagctcctgctccactgggggccccggggctccccaatggcctcctttcaggagatgaagacttctcctccattgcggacatggacttctcagccctgctgagtcagatcagctccagtgggcagggaggaggtggaagcgaccaaagcacctttgacattttgcaggatttggagttttcttctgggtccccaggtaaagagacgaatgagagtccttggagatcagacctgttgatagatgaaaactgtttgctttctcctctggcgggagaagacgattcattccttttggaaggaaactcgaatgaggac

SEQ ID NO: 154 - DNA, 2496 bp, Artificial sequence
  Synthetic construct
atggccttaccagtgaccgccttgctcctgccgctggccttgctgctccacgccgccaggccggagcagaagctgatcagcgaggaggacctggacatccagatgacacagactacatcctccctgtctgcctctctgggagacagagtcaccatcagttgcagggcaagtcaggacattagtaaatatttaaattggtatcagcagaaaccagatggaactgttaaactcctgatctaccatacatcaagattacactcaggagtcccatcaaggttcagtggcagtgggtctggaacagattattctctcaccattagcaacctggagcaagaagatattgccacttacttttgccaacagggtaatacgcttccgtacacgttcggaggggggaccaagctggagatcacaggtggcggtggctcgggcggtggtgggtcgggtggcggcggatctgaggtgaaactgcaggagtcaggacctggcctggtggcgccctcacagagcctgtccgtcacatgcactgtctcaggggtctcattacccgactatggtgtaagctggattcgccagcctccacgaaagggtctggagtggctgggagtaatatggggtagtgaaaccacatactataattcagctctcaaatccagactgaccatcatcaaggacaactccaagagccaagttttcttaaaaatgaacagtctgcaaactgatgacacagccatttactactgtgccaaacattattactacggtggtagctatgctatggactactggggccaaggaacctcagtcaccgtctcctcaaccacgacgccagcgccgcgaccaccaacaccggcgcccaccatcgcgtcgcagcccctgtccctgcgcccagaggcgtgctttatgtacgtggcagccgcggcatttgtacttctgtttttcgtggggtgcggtgtgcttctcagcaagaggaaacggaagcaccccaagaaaaagaggaaggtgtctagacccggagagcgcccattccagtgtcggatttgcatgcggaacttttcgagaagacacggcctggacagacatacccgtactcatacaggtgaaaaaccctttcagtgtcggatctgtatgcgaaatttctccgaccacagcagcctgaagagacatctacgtacccacaccggcagccagaagccatttcagtgtcggatctgtatgcggaacttctccgtgagacacaacctgaccagacatctacgtacgcacaccggagagaagccattccaatgccgaatatgcatgcgcaacttcagtgaccacagcaacctgagcagacacctaaaaacccacaccggttcccagaagccatttcagtgtcggatctgtatgcggaacttctcccagcgcagcagcctggtgagacatctacgtacgcacaccggagagaagccattccaatgccgaatatgcatgcgcaacttcagtgagagcggccacctgaagagacacctgcgtacgcacctgagggatgagtttcccaccatggtgtttccttctgggcagatcagccaggcctcggccttggccccggcccctccccaagtcctgccccaggctccagcccctgcccctgctccagccatggtatcagctctggcccaggccccagcccctgtcccagtcctagccccaggccctcctcaggctgtggccccacctgcccccaagcccacccaggctggggaaggaacgctgtcagaggccctgctgcagctgcagtttgatgatgaagacctgggggccttgcttggcaacagcacagacccagctgtgttcacagacctggcatccgtcgacaactccgagtttcagcagctgctgaaccagggcatacctgtggccccccacacaactgagcccatgctgatggagtaccctgaggctataactcgcctagtgacaggggcccagaggccccccgacccagctcctgctccactgggggccccggggctccccaatggcctcctttcaggagatgaagacttctcctccattgcggacatggacttctcagccctgctgagtcagatcagctccagtgggcagggaggaggtggaagcggcttcagcgtggacaccagtgccctgctggacctgttcagcccctcggtgaccgtgcccgacatgagcctgcctgaccttgacagcagcctggccagtatccaagagctcctgtctccccaggagccccccaggcctcccgaggcagagaacagcagcccggattcagggaagcagctggtgcactacacagcgcagccgctgttcctgctggaccccggctccgtggacaccgggagcaacgacctgccggtgctgtttgagctgggagagggctcctacttctccgaaggggacggcttcgccgaggaccccaccatctccctgctgacaggctcggagcctcccaaagccaaggaccccactgtctcc

SEQ ID NO: 155 - DNA, 2298 bp, Artificial sequence
  Synthetic construct
atggccttaccagtgaccgccttgctcctgccgctggccttgctgctccacgccgccaggccggagcagaagctgatcagcgaggaggacctggacatccagatgacacagactacatcctccctgtctgcctctctgggagacagagtcaccatcagttgcagggcaagtcaggacattagtaaatatttaaattggtatcagcagaaaccagatggaactgttaaactcctgatctaccatacatcaagattacactcaggagtcccatcaaggttcagtggcagtgggtctggaacagattattctctcaccattagcaacctggagcaagaagatattgccacttacttttgccaacagggtaatacgcttccgtacacgttcggaggggggaccaagctggagatcacaggtggcggtggctcgggcggtggtgggtcgggtggcggcggatctgaggtgaaactgcaggagtcaggacctggcctggtggcgccctcacagagcctgtccgtcacatgcactgtctcaggggtctcattacccgactatggtgtaagctggattcgccagcctccacgaaagggtctggagtggctgggagtaatatggggtagtgaaaccacatactataattcagctctcaaatccagactgaccatcatcaaggacaactccaagagccaagttttcttaaaaatgaacagtctgcaaactgatgacacagccatttactactgtgccaaacattattactacggtggtagctatgctatggactactggggccaaggaacctcagtcaccgtctcctcaaccacgacgccagcgccgcgaccaccaacaccggcgcccaccatcgcgtcgcagcccctgtccctgcgcccagaggcgtgctttatgtacgtggcagccgcggcatttgtacttctgtttttcgtggggtgcggtgtgcttctcagcaagaggaaacggaagcaccccaagaaaaagaggaaggtgtctagacccggagagcgcccattccagtgtcggatttgcatgcggaacttttcgagaagacacggcctggacagacatacccgtactcatacaggtgaaaaaccctttcagtgtcggatctgtatgcgaaatttctccgaccacagcagcctgaagagacatctacgtacccacaccggcagccagaagccatttcagtgtcggatctgtatgcggaacttctccgtgagacacaacctgaccagacatctacgtacgcacaccggagagaagccattccaatgccgaatatgcatgcgcaacttcagtgaccacagcaacctgagcagacacctaaaaacccacaccggttcccagaagccatttcagtgtcggatctgtatgcggaacttctcccagcgcagcagcctggtgagacatctacgtacgcacaccggagagaagccattccaatgccgaatatgcatgcgcaacttcagtgagagcggccacctgaagagacacctgcgtacgcacctgagggatgagtttcccaccatggtgtttccttctgggcagatcagccaggcctcggccttggccccggcccctccccaagtcctgccccaggctccagcccctgcccctgctccagccatggtatcagctctggcccaggccccagcccctgtcccagtcctagccccaggccctcctcaggctgtggccccacctgcccccaagcccacccaggctggggaaggaacgctgtcagaggccctgctgcagctgcagtttgatgatgaagacctgggggccttgcttggcaacagcacagacccagctgtgttcacagacctggcatccgtcgacaactccgagtttcagcagctgctgaaccagggcatacctgtggccccccacacaactgagcccatgctgatggagtaccctgaggctataactcgcctagtgacaggggcccagaggccccccgacccagctcctgctccactgggggccccggggctccccaatggcctcctttcaggagatgaagacttctcctccattgcggacatggacttctcagccctgctgagtcagatcagctccagtgggcagggaggaggtggaagcgaccaaagcacctttgacattttgcaggatttggagttttcttctgggtccccaggtaaagagacgaatgagagtccttggagatcagacctgttgatagatgaaaactgtttgctttctcctctggcgggagaagacgattcattccttttggaaggaaactcgaatgaggac

SEQ ID NO: 156 - DNA, 2112 bp, Artificial sequence
  Synthetic construct
atggcgttgcctgtcacggcactgctccttccccttgcacttcttcttcatgcagctcgccccgagcagaaattgatctccgaagaagaccttcaggtccaactgcagcaatcaggtggaggacttgtgaaaccaggagggagtctgaggcttagctgcgcagcgagtgggtttactttctctagttacgccatgcactgggtgcgccaagcccccgggaaaggactggagtgggtcgctgttatttcatatgacgggtcaaataaatactacgccgattcagtaaagggtcgatttactatatctagggacaacagtaagaacacactttatctgcagatggatagcctgcgggcggaggacactgcagtctactattgcgcgaaggaaggagacagctcacgctggagctacgacctctggggaagggggactctcgtaacggtgtcatccggcggtggcggcagcggtggtggtggatcagggggaggggggtctcagtcagcactcacccaacccgcatccgtgtctggtagtccgggccagagtattactatctcctgtactgggacatcctccgacgttgggggctataactacgtcagctggtatcaacagcaccctggtaaggcacccaaggtaatgatctatgatgtgacaaacagacccagcggtgtttctaaccgatttagcggttcaaaatcaggtaacaccgcaagccttaccatatctggtctccaggctgaagacgaagccgactattactgcagcagctataccatagcctctacactggttgtcttcggaggaggcactaagctgactgtgctaaccacgacgccagcgccgcgaccaccaacaccggcgcccaccatcgcgtcgcagcccctgtccctgcgcccagaggcgtgctttatgtacgtggcagccgcggcatttgtacttctgtttttcgtggggtgcggtgtgcttctcagcaagaggaaacggaagcaccccaagaaaaagaggaaggtgtctagaccaggcgaacgaccgtttcaatgccggatatgtatgaggaacttctcccagcagaccaatctcacgcggcacacccgaacacatacaggagaaaagccattccaatgtcgaatttgtatgcgcaatttttcacagaaggctaacctcggcgttcacctccgcacacatactggttcacagaagccctttcagtgcaggatttgtatgcgcaactttagcgatcactcatctctgaaacgccacactagaacgcatacaggtgagaagcctttccagtgtcgcatctgtatgcggaacttcagccgagcggatatgcttagacgccatttgcgaactcacaccggttctcaaaaaccttttcagtgccgaatttgtatgcgcaacttcagcgagaaacagaacctggcacgccacacgcgcacgcacaccggggaaaaaccgtttcaatgtcgaatctgcatgcgcaattttagcgacccctctaatcttaggaggcatctgcgcacacacttgcgggatgagtttcccaccatggtgtttccttctgggcagatcagccaggcctcggccttggccccggcccctccccaagtcctgccccaggctccagcccctgcccctgctccagccatggtatcagctctggcccaggccccagcccctgtcccagtcctagccccaggccctcctcaggctgtggccccacctgcccccaagcccacccaggctggggaaggaacgctgtcagaggccctgctgcagctgcagtttgatgatgaagacctgggggccttgcttggcaacagcacagacccagctgtgttcacagacctggcatccgtcgacaactccgagtttcagcagctgctgaaccagggcatacctgtggccccccacacaactgagcccatgctgatggagtaccctgaggctataactcgcctagtgacaggggcccagaggccccccgacccagctcctgctccactgggggccccggggctccccaatggcctcctttcaggagatgaagacttctcctccattgcggacatggacttctcagccctgctgagtcagatcagctcc

SEQ ID NO: 157 - DNA, 2508 bp, Artificial sequence
  Synthetic construct
atggcgttgcctgtcacggcactgctccttccccttgcacttcttcttcatgcagctcgccccgagcagaaattgatctccgaagaagaccttcaggtccaactgcagcaatcaggtggaggacttgtgaaaccaggagggagtctgaggcttagctgcgcagcgagtgggtttactttctctagttacgccatgcactgggtgcgccaagcccccgggaaaggactggagtgggtcgctgttatttcatatgacgggtcaaataaatactacgccgattcagtaaagggtcgatttactatatctagggacaacagtaagaacacactttatctgcagatggatagcctgcgggcggaggacactgcagtctactattgcgcgaaggaaggagacagctcacgctggagctacgacctctggggaagggggactctcgtaacggtgtcatccggcggtggcggcagcggtggtggtggatcagggggaggggggtctcagtcagcactcacccaacccgcatccgtgtctggtagtccgggccagagtattactatctcctgtactgggacatcctccgacgttgggggctataactacgtcagctggtatcaacagcaccctggtaaggcacccaaggtaatgatctatgatgtgacaaacagacccagcggtgtttctaaccgatttagcggttcaaaatcaggtaacaccgcaagccttaccatatctggtctccaggctgaagacgaagccgactattactgcagcagctataccatagcctctacactggttgtcttcggaggaggcactaagctgactgtgctaaccacgacgccagcgccgcgaccaccaacaccggcgcccaccatcgcgtcgcagcccctgtccctgcgcccagaggcgtgctttatgtacgtggcagccgcggcatttgtacttctgtttttcgtggggtgcggtgtgcttctcagcaagaggaaacggaagcaccccaagaaaaagaggaaggtgtctagaccaggcgaacgaccgtttcaatgccggatatgtatgaggaacttctcccagcagaccaatctcacgcggcacacccgaacacatacaggagaaaagccattccaatgtcgaatttgtatgcgcaatttttcacagaaggctaacctcggcgttcacctccgcacacatactggttcacagaagccctttcagtgcaggatttgtatgcgcaactttagcgatcactcatctctgaaacgccacactagaacgcatacaggtgagaagcctttccagtgtcgcatctgtatgcggaacttcagccgagcggatatgcttagacgccatttgcgaactcacaccggttctcaaaaaccttttcagtgccgaatttgtatgcgcaacttcagcgagaaacagaacctggcacgccacacgcgcacgcacaccggggaaaaaccgtttcaatgtcgaatctgcatgcgcaattttagcgacccctctaatcttaggaggcatctgcgcacacacttgcgggatgagtttcccaccatggtgtttccttctgggcagatcagccaggcctcggccttggccccggcccctccccaagtcctgccccaggctccagcccctgcccctgctccagccatggtatcagctctggcccaggccccagcccctgtcccagtcctagccccaggccctcctcaggctgtggccccacctgcccccaagcccacccaggctggggaaggaacgctgtcagaggccctgctgcagctgcagtttgatgatgaagacctgggggccttgcttggcaacagcacagacccagctgtgttcacagacctggcatccgtcgacaactccgagtttcagcagctgctgaaccagggcatacctgtggccccccacacaactgagcccatgctgatggagtaccctgaggctataactcgcctagtgacaggggcccagaggccccccgacccagctcctgctccactgggggccccggggctccccaatggcctcctttcaggagatgaagacttctcctccattgcggacatggacttctcagccctgctgagtcagatcagctccagtgggcagggaggaggtggaagcggcttcagcgtggacaccagtgccctgctggacctgttcagcccctcggtgaccgtgcccgacatgagcctgcctgaccttgacagcagcctggccagtatccaagagctcctgtctccccaggagccccccaggcctcccgaggcagagaacagcagcccggattcagggaagcagctggtgcactacacagcgcagccgctgttcctgctggaccccggctccgtggacaccgggagcaacgacctgccggtgctgtttgagctgggagagggctcctacttctccgaaggggacggcttcgccgaggaccccaccatctccctgctgacaggctcggagcctcccaaagccaaggaccccactgtctcc

SEQ ID NO: 158 - DNA, 2310 bp, Artificial sequence
  Synthetic construct
atggcgttgcctgtcacggcactgctccttccccttgcacttcttcttcatgcagctcgccccgagcagaaattgatctccgaagaagaccttcaggtccaactgcagcaatcaggtggaggacttgtgaaaccaggagggagtctgaggcttagctgcgcagcgagtgggtttactttctctagttacgccatgcactgggtgcgccaagcccccgggaaaggactggagtgggtcgctgttatttcatatgacgggtcaaataaatactacgccgattcagtaaagggtcgatttactatatctagggacaacagtaagaacacactttatctgcagatggatagcctgcgggcggaggacactgcagtctactattgcgcgaaggaaggagacagctcacgctggagctacgacctctggggaagggggactctcgtaacggtgtcatccggcggtggcggcagcggtggtggtggatcagggggaggggggtctcagtcagcactcacccaacccgcatccgtgtctggtagtccgggccagagtattactatctcctgtactgggacatcctccgacgttgggggctataactacgtcagctggtatcaacagcaccctggtaaggcacccaaggtaatgatctatgatgtgacaaacagacccagcggtgtttctaaccgatttagcggttcaaaatcaggtaacaccgcaagccttaccatatctggtctccaggctgaagacgaagccgactattactgcagcagctataccatagcctctacactggttgtcttcggaggaggcactaagctgactgtgctaaccacgacgccagcgccgcgaccaccaacaccggcgcccaccatcgcgtcgcagcccctgtccctgcgcccagaggcgtgctttatgtacgtggcagccgcggcatttgtacttctgtttttcgtggggtgcggtgtgcttctcagcaagaggaaacggaagcaccccaagaaaaagaggaaggtgtctagaccaggcgaacgaccgtttcaatgccggatatgtatgaggaacttctcccagcagaccaatctcacgcggcacacccgaacacatacaggagaaaagccattccaatgtcgaatttgtatgcgcaatttttcacagaaggctaacctcggcgttcacctccgcacacatactggttcacagaagccctttcagtgcaggatttgtatgcgcaactttagcgatcactcatctctgaaacgccacactagaacgcatacaggtgagaagcctttccagtgtcgcatctgtatgcggaacttcagccgagcggatatgcttagacgccatttgcgaactcacaccggttctcaaaaaccttttcagtgccgaatttgtatgcgcaacttcagcgagaaacagaacctggcacgccacacgcgcacgcacaccggggaaaaaccgtttcaatgtcgaatctgcatgcgcaattttagcgacccctctaatcttaggaggcatctgcgcacacacttgcgggatgagtttcccaccatggtgtttccttctgggcagatcagccaggcctcggccttggccccggcccctccccaagtcctgccccaggctccagcccctgcccctgctccagccatggtatcagctctggcccaggccccagcccctgtcccagtcctagccccaggccctcctcaggctgtggccccacctgcccccaagcccacccaggctggggaaggaacgctgtcagaggccctgctgcagctgcagtttgatgatgaagacctgggggccttgcttggcaacagcacagacccagctgtgttcacagacctggcatccgtcgacaactccgagtttcagcagctgctgaaccagggcatacctgtggccccccacacaactgagcccatgctgatggagtaccctgaggctataactcgcctagtgacaggggcccagaggccccccgacccagctcctgctccactgggggccccggggctccccaatggcctcctttcaggagatgaagacttctcctccattgcggacatggacttctcagccctgctgagtcagatcagctccagtgggcagggaggaggtggaagcgaccaaagcacctttgacattttgcaggatttggagttttcttctgggtccccaggtaaagagacgaatgagagtccttggagatcagacctgttgatagatgaaaactgtttgctttctcctctggcgggagaagacgattcattccttttggaaggaaactcgaatgaggac

SEQ ID NO: 159 - DNA, 2103 bp, Artificial sequence
  Synthetic construct
atggcgttgcctgtcacggcactgctccttccccttgcacttcttcttcatgcagctcgccccgagcagaaattgatctccgaagaagaccttcaggtccaactgcagcaatcaggtggaggacttgtgaaaccaggagggagtctgaggcttagctgcgcagcgagtgggtttactttctctagttacgccatgcactgggtgcgccaagcccccgggaaaggactggagtgggtcgctgttatttcatatgacgggtcaaataaatactacgccgattcagtaaagggtcgatttactatatctagggacaacagtaagaacacactttatctgcagatggatagcctgcgggcggaggacactgcagtctactattgcgcgaaggaaggagacagctcacgctggagctacgacctctggggaagggggactctcgtaacggtgtcatccggcggtggcggcagcggtggtggtggatcagggggaggggggtctcagtcagcactcacccaacccgcatccgtgtctggtagtccgggccagagtattactatctcctgtactgggacatcctccgacgttgggggctataactacgtcagctggtatcaacagcaccctggtaaggcacccaaggtaatgatctatgatgtgacaaacagacccagcggtgtttctaaccgatttagcggttcaaaatcaggtaacaccgcaagccttaccatatctggtctccaggctgaagacgaagccgactattactgcagcagctataccatagcctctacactggttgtcttcggaggaggcactaagctgactgtgctaaccacgacgccagcgccgcgaccaccaacaccggcgcccaccatcgcgtcgcagcccctgtccctgcgcccagaggcgtgctttatgtacgtggcagccgcggcatttgtacttctgtttttcgtggggtgcggtgtgcttctcagcaagaggaaacggaagcaccggaggaagaagtctagaccaggcgaacgaccgtttcaatgccggatatgtatgaggaacttctcccagcagaccaatctcacgcggcacacccgaacacatacaggagaaaagccattccaatgtcgaatttgtatgcgcaatttttcacagaaggctaacctcggcgttcacctccgcacacatactggttcacagaagccctttcagtgcaggatttgtatgcgcaactttagcgatcactcatctctgaaacgccacactagaacgcatacaggtgagaagcctttccagtgtcgcatctgtatgcggaacttcagccgagcggatatgcttagacgccatttgcgaactcacaccggttctcaaaaaccttttcagtgccgaatttgtatgcgcaacttcagcgagaaacagaacctggcacgccacacgcgcacgcacaccggggaaaaaccgtttcaatgtcgaatctgcatgcgcaattttagcgacccctctaatcttaggaggcatctgcgcacacacttgcgggatgagtttcccaccatggtgtttccttctgggcagatcagccaggcctcggccttggccccggcccctccccaagtcctgccccaggctccagcccctgcccctgctccagccatggtatcagctctggcccaggccccagcccctgtcccagtcctagccccaggccctcctcaggctgtggccccacctgcccccaagcccacccaggctggggaaggaacgctgtcagaggccctgctgcagctgcagtttgatgatgaagacctgggggccttgcttggcaacagcacagacccagctgtgttcacagacctggcatccgtcgacaactccgagtttcagcagctgctgaaccagggcatacctgtggccccccacacaactgagcccatgctgatggagtaccctgaggctataactcgcctagtgacaggggcccagaggccccccgacccagctcctgctccactgggggccccggggctccccaatggcctcctttcaggagatgaagacttctcctccattgcggacatggacttctcagccctgctgagtcagatcagctcc

SEQ ID NO: 160 - DNA, 2499 bp, Artificial sequence
  Synthetic construct
atggcgttgcctgtcacggcactgctccttccccttgcacttcttcttcatgcagctcgccccgagcagaaattgatctccgaagaagaccttcaggtccaactgcagcaatcaggtggaggacttgtgaaaccaggagggagtctgaggcttagctgcgcagcgagtgggtttactttctctagttacgccatgcactgggtgcgccaagcccccgggaaaggactggagtgggtcgctgttatttcatatgacgggtcaaataaatactacgccgattcagtaaagggtcgatttactatatctagggacaacagtaagaacacactttatctgcagatggatagcctgcgggcggaggacactgcagtctactattgcgcgaaggaaggagacagctcacgctggagctacgacctctggggaagggggactctcgtaacggtgtcatccggcggtggcggcagcggtggtggtggatcagggggaggggggtctcagtcagcactcacccaacccgcatccgtgtctggtagtccgggccagagtattactatctcctgtactgggacatcctccgacgttgggggctataactacgtcagctggtatcaacagcaccctggtaaggcacccaaggtaatgatctatgatgtgacaaacagacccagcggtgtttctaaccgatttagcggttcaaaatcaggtaacaccgcaagccttaccatatctggtctccaggctgaagacgaagccgactattactgcagcagctataccatagcctctacactggttgtcttcggaggaggcactaagctgactgtgctaaccacgacgccagcgccgcgaccaccaacaccggcgcccaccatcgcgtcgcagcccctgtccctgcgcccagaggcgtgctttatgtacgtggcagccgcggcatttgtacttctgtttttcgtggggtgcggtgtgcttctcagcaagaggaaacggaagcaccggaggaagaagtctagaccaggcgaacgaccgtttcaatgccggatatgtatgaggaacttctcccagcagaccaatctcacgcggcacacccgaacacatacaggagaaaagccattccaatgtcgaatttgtatgcgcaatttttcacagaaggctaacctcggcgttcacctccgcacacatactggttcacagaagccctttcagtgcaggatttgtatgcgcaactttagcgatcactcatctctgaaacgccacactagaacgcatacaggtgagaagcctttccagtgtcgcatctgtatgcggaacttcagccgagcggatatgcttagacgccatttgcgaactcacaccggttctcaaaaaccttttcagtgccgaatttgtatgcgcaacttcagcgagaaacagaacctggcacgccacacgcgcacgcacaccggggaaaaaccgtttcaatgtcgaatctgcatgcgcaattttagcgacccctctaatcttaggaggcatctgcgcacacacttgcgggatgagtttcccaccatggtgtttccttctgggcagatcagccaggcctcggccttggccccggcccctccccaagtcctgccccaggctccagcccctgcccctgctccagccatggtatcagctctggcccaggccccagcccctgtcccagtcctagccccaggccctcctcaggctgtggccccacctgcccccaagcccacccaggctggggaaggaacgctgtcagaggccctgctgcagctgcagtttgatgatgaagacctgggggccttgcttggcaacagcacagacccagctgtgttcacagacctggcatccgtcgacaactccgagtttcagcagctgctgaaccagggcatacctgtggccccccacacaactgagcccatgctgatggagtaccctgaggctataactcgcctagtgacaggggcccagaggccccccgacccagctcctgctccactgggggccccggggctccccaatggcctcctttcaggagatgaagacttctcctccattgcggacatggacttctcagccctgctgagtcagatcagctccagtgggcagggaggaggtggaagcggcttcagcgtggacaccagtgccctgctggacctgttcagcccctcggtgaccgtgcccgacatgagcctgcctgaccttgacagcagcctggccagtatccaagagctcctgtctccccaggagccccccaggcctcccgaggcagagaacagcagcccggattcagggaagcagctggtgcactacacagcgcagccgctgttcctgctggaccccggctccgtggacaccgggagcaacgacctgccggtgctgtttgagctgggagagggctcctacttctccgaaggggacggcttcgccgaggaccccaccatctccctgctgacaggctcggagcctcccaaagccaaggaccccactgtctcc

SEQ ID NO: 161 - DNA, 2301 bp, Artificial sequence
  Synthetic construct
atggcgttgcctgtcacggcactgctccttccccttgcacttcttcttcatgcagctcgccccgagcagaaattgatctccgaagaagaccttcaggtccaactgcagcaatcaggtggaggacttgtgaaaccaggagggagtctgaggcttagctgcgcagcgagtgggtttactttctctagttacgccatgcactgggtgcgccaagcccccgggaaaggactggagtgggtcgctgttatttcatatgacgggtcaaataaatactacgccgattcagtaaagggtcgatttactatatctagggacaacagtaagaacacactttatctgcagatggatagcctgcgggcggaggacactgcagtctactattgcgcgaaggaaggagacagctcacgctggagctacgacctctggggaagggggactctcgtaacggtgtcatccggcggtggcggcagcggtggtggtggatcagggggaggggggtctcagtcagcactcacccaacccgcatccgtgtctggtagtccgggccagagtattactatctcctgtactgggacatcctccgacgttgggggctataactacgtcagctggtatcaacagcaccctggtaaggcacccaaggtaatgatctatgatgtgacaaacagacccagcggtgtttctaaccgatttagcggttcaaaatcaggtaacaccgcaagccttaccatatctggtctccaggctgaagacgaagccgactattactgcagcagctataccatagcctctacactggttgtcttcggaggaggcactaagctgactgtgctaaccacgacgccagcgccgcgaccaccaacaccggcgcccaccatcgcgtcgcagcccctgtccctgcgcccagaggcgtgctttatgtacgtggcagccgcggcatttgtacttctgtttttcgtggggtgcggtgtgcttctcagcaagaggaaacggaagcaccggaggaagaagtctagaccaggcgaacgaccgtttcaatgccggatatgtatgaggaacttctcccagcagaccaatctcacgcggcacacccgaacacatacaggagaaaagccattccaatgtcgaatttgtatgcgcaatttttcacagaaggctaacctcggcgttcacctccgcacacatactggttcacagaagccctttcagtgcaggatttgtatgcgcaactttagcgatcactcatctctgaaacgccacactagaacgcatacaggtgagaagcctttccagtgtcgcatctgtatgcggaacttcagccgagcggatatgcttagacgccatttgcgaactcacaccggttctcaaaaaccttttcagtgccgaatttgtatgcgcaacttcagcgagaaacagaacctggcacgccacacgcgcacgcacaccggggaaaaaccgtttcaatgtcgaatctgcatgcgcaattttagcgacccctctaatcttaggaggcatctgcgcacacacttgcgggatgagtttcccaccatggtgtttccttctgggcagatcagccaggcctcggccttggccccggcccctccccaagtcctgccccaggctccagcccctgcccctgctccagccatggtatcagctctggcccaggccccagcccctgtcccagtcctagccccaggccctcctcaggctgtggccccacctgcccccaagcccacccaggctggggaaggaacgctgtcagaggccctgctgcagctgcagtttgatgatgaagacctgggggccttgcttggcaacagcacagacccagctgtgttcacagacctggcatccgtcgacaactccgagtttcagcagctgctgaaccagggcatacctgtggccccccacacaactgagcccatgctgatggagtaccctgaggctataactcgcctagtgacaggggcccagaggccccccgacccagctcctgctccactgggggccccggggctccccaatggcctcctttcaggagatgaagacttctcctccattgcggacatggacttctcagccctgctgagtcagatcagctccagtgggcagggaggaggtggaagcgaccaaagcacctttgacattttgcaggatttggagttttcttctgggtccccaggtaaagagacgaatgagagtccttggagatcagacctgttgatagatgaaaactgtttgctttctcctctggcgggagaagacgattcattccttttggaaggaaactcgaatgaggac

SEQ ID NO: 162 - DNA, 2112 bp, Artificial sequence
  Synthetic construct
atggcgttgcctgtcacggcactgctccttccccttgcacttcttcttcatgcagctcgccccgagcagaaattgatctccgaagaagaccttcaggtccaactgcagcaatcaggtggaggacttgtgaaaccaggagggagtctgaggcttagctgcgcagcgagtgggtttactttctctagttacgccatgcactgggtgcgccaagcccccgggaaaggactggagtgggtcgctgttatttcatatgacgggtcaaataaatactacgccgattcagtaaagggtcgatttactatatctagggacaacagtaagaacacactttatctgcagatggatagcctgcgggcggaggacactgcagtctactattgcgcgaaggaaggagacagctcacgctggagctacgacctctggggaagggggactctcgtaacggtgtcatccggcggtggcggcagcggtggtggtggatcagggggaggggggtctcagtcagcactcacccaacccgcatccgtgtctggtagtccgggccagagtattactatctcctgtactgggacatcctccgacgttgggggctataactacgtcagctggtatcaacagcaccctggtaaggcacccaaggtaatgatctatgatgtgacaaacagacccagcggtgtttctaaccgatttagcggttcaaaatcaggtaacaccgcaagccttaccatatctggtctccaggctgaagacgaagccgactattactgcagcagctataccatagcctctacactggttgtcttcggaggaggcactaagctgactgtgctaaccacgacgccagcgccgcgaccaccaacaccggcgcccaccatcgcgtcgcagcccctgtccctgcgcccagaggcgtgctttatgtacgtggcagccgcggcatttgtacttctgtttttcgtggggtgcggtgtgcttctcagcaagaggaaacggaagcaccccaagaaaaagaggaaggtgtctagacccggagagcgcccattccagtgtcggatttgcatgcggaacttttcgagaagacacggcctggacagacatacccgtactcatacaggtgaaaaaccctttcagtgtcggatctgtatgcgaaatttctccgaccacagcagcctgaagagacatctacgtacccacaccggcagccagaagccatttcagtgtcggatctgtatgcggaacttctccgtgagacacaacctgaccagacatctacgtacgcacaccggagagaagccattccaatgccgaatatgcatgcgcaacttcagtgaccacagcaacctgagcagacacctaaaaacccacaccggttcccagaagccatttcagtgtcggatctgtatgcggaacttctcccagcgcagcagcctggtgagacatctacgtacgcacaccggagagaagccattccaatgccgaatatgcatgcgcaacttcagtgagagcggccacctgaagagacacctgcgtacgcacctgagggatgagtttcccaccatggtgtttccttctgggcagatcagccaggcctcggccttggccccggcccctccccaagtcctgccccaggctccagcccctgcccctgctccagccatggtatcagctctggcccaggccccagcccctgtcccagtcctagccccaggccctcctcaggctgtggccccacctgcccccaagcccacccaggctggggaaggaacgctgtcagaggccctgctgcagctgcagtttgatgatgaagacctgggggccttgcttggcaacagcacagacccagctgtgttcacagacctggcatccgtcgacaactccgagtttcagcagctgctgaaccagggcatacctgtggccccccacacaactgagcccatgctgatggagtaccctgaggctataactcgcctagtgacaggggcccagaggccccccgacccagctcctgctccactgggggccccggggctccccaatggcctcctttcaggagatgaagacttctcctccattgcggacatggacttctcagccctgctgagtcagatcagctcc

SEQ ID NO: 163 - DNA, 2508 bp, Artificial sequence
  Synthetic construct
atggcgttgcctgtcacggcactgctccttccccttgcacttcttcttcatgcagctcgccccgagcagaaattgatctccgaagaagaccttcaggtccaactgcagcaatcaggtggaggacttgtgaaaccaggagggagtctgaggcttagctgcgcagcgagtgggtttactttctctagttacgccatgcactgggtgcgccaagcccccgggaaaggactggagtgggtcgctgttatttcatatgacgggtcaaataaatactacgccgattcagtaaagggtcgatttactatatctagggacaacagtaagaacacactttatctgcagatggatagcctgcgggcggaggacactgcagtctactattgcgcgaaggaaggagacagctcacgctggagctacgacctctggggaagggggactctcgtaacggtgtcatccggcggtggcggcagcggtggtggtggatcagggggaggggggtctcagtcagcactcacccaacccgcatccgtgtctggtagtccgggccagagtattactatctcctgtactgggacatcctccgacgttgggggctataactacgtcagctggtatcaacagcaccctggtaaggcacccaaggtaatgatctatgatgtgacaaacagacccagcggtgtttctaaccgatttagcggttcaaaatcaggtaacaccgcaagccttaccatatctggtctccaggctgaagacgaagccgactattactgcagcagctataccatagcctctacactggttgtcttcggaggaggcactaagctgactgtgctaaccacgacgccagcgccgcgaccaccaacaccggcgcccaccatcgcgtcgcagcccctgtccctgcgcccagaggcgtgctttatgtacgtggcagccgcggcatttgtacttctgtttttcgtggggtgcggtgtgcttctcagcaagaggaaacggaagcaccccaagaaaaagaggaaggtgtctagacccggagagcgcccattccagtgtcggatttgcatgcggaacttttcgagaagacacggcctggacagacatacccgtactcatacaggtgaaaaaccctttcagtgtcggatctgtatgcgaaatttctccgaccacagcagcctgaagagacatctacgtacccacaccggcagccagaagccatttcagtgtcggatctgtatgcggaacttctccgtgagacacaacctgaccagacatctacgtacgcacaccggagagaagccattccaatgccgaatatgcatgcgcaacttcagtgaccacagcaacctgagcagacacctaaaaacccacaccggttcccagaagccatttcagtgtcggatctgtatgcggaacttctcccagcgcagcagcctggtgagacatctacgtacgcacaccggagagaagccattccaatgccgaatatgcatgcgcaacttcagtgagagcggccacctgaagagacacctgcgtacgcacctgagggatgagtttcccaccatggtgtttccttctgggcagatcagccaggcctcggccttggccccggcccctccccaagtcctgccccaggctccagcccctgcccctgctccagccatggtatcagctctggcccaggccccagcccctgtcccagtcctagccccaggccctcctcaggctgtggccccacctgcccccaagcccacccaggctggggaaggaacgctgtcagaggccctgctgcagctgcagtttgatgatgaagacctgggggccttgcttggcaacagcacagacccagctgtgttcacagacctggcatccgtcgacaactccgagtttcagcagctgctgaaccagggcatacctgtggccccccacacaactgagcccatgctgatggagtaccctgaggctataactcgcctagtgacaggggcccagaggccccccgacccagctcctgctccactgggggccccggggctccccaatggcctcctttcaggagatgaagacttctcctccattgcggacatggacttctcagccctgctgagtcagatcagctccagtgggcagggaggaggtggaagcggcttcagcgtggacaccagtgccctgctggacctgttcagcccctcggtgaccgtgcccgacatgagcctgcctgaccttgacagcagcctggccagtatccaagagctcctgtctccccaggagccccccaggcctcccgaggcagagaacagcagcccggattcagggaagcagctggtgcactacacagcgcagccgctgttcctgctggaccccggctccgtggacaccgggagcaacgacctgccggtgctgtttgagctgggagagggctcctacttctccgaaggggacggcttcgccgaggaccccaccatctccctgctgacaggctcggagcctcccaaagccaaggaccccactgtctcc

SEQ ID NO: 164 - DNA, 2310 bp, Artificial sequence
  Synthetic construct
atggcgttgcctgtcacggcactgctccttccccttgcacttcttcttcatgcagctcgccccgagcagaaattgatctccgaagaagaccttcaggtccaactgcagcaatcaggtggaggacttgtgaaaccaggagggagtctgaggcttagctgcgcagcgagtgggtttactttctctagttacgccatgcactgggtgcgccaagcccccgggaaaggactggagtgggtcgctgttatttcatatgacgggtcaaataaatactacgccgattcagtaaagggtcgatttactatatctagggacaacagtaagaacacactttatctgcagatggatagcctgcgggcggaggacactgcagtctactattgcgcgaaggaaggagacagctcacgctggagctacgacctctggggaagggggactctcgtaacggtgtcatccggcggtggcggcagcggtggtggtggatcagggggaggggggtctcagtcagcactcacccaacccgcatccgtgtctggtagtccgggccagagtattactatctcctgtactgggacatcctccgacgttgggggctataactacgtcagctggtatcaacagcaccctggtaaggcacccaaggtaatgatctatgatgtgacaaacagacccagcggtgtttctaaccgatttagcggttcaaaatcaggtaacaccgcaagccttaccatatctggtctccaggctgaagacgaagccgactattactgcagcagctataccatagcctctacactggttgtcttcggaggaggcactaagctgactgtgctaaccacgacgccagcgccgcgaccaccaacaccggcgcccaccatcgcgtcgcagcccctgtccctgcgcccagaggcgtgctttatgtacgtggcagccgcggcatttgtacttctgtttttcgtggggtgcggtgtgcttctcagcaagaggaaacggaagcaccccaagaaaaagaggaaggtgtctagacccggagagcgcccattccagtgtcggatttgcatgcggaacttttcgagaagacacggcctggacagacatacccgtactcatacaggtgaaaaaccctttcagtgtcggatctgtatgcgaaatttctccgaccacagcagcctgaagagacatctacgtacccacaccggcagccagaagccatttcagtgtcggatctgtatgcggaacttctccgtgagacacaacctgaccagacatctacgtacgcacaccggagagaagccattccaatgccgaatatgcatgcgcaacttcagtgaccacagcaacctgagcagacacctaaaaacccacaccggttcccagaagccatttcagtgtcggatctgtatgcggaacttctcccagcgcagcagcctggtgagacatctacgtacgcacaccggagagaagccattccaatgccgaatatgcatgcgcaacttcagtgagagcggccacctgaagagacacctgcgtacgcacctgagggatgagtttcccaccatggtgtttccttctgggcagatcagccaggcctcggccttggccccggcccctccccaagtcctgccccaggctccagcccctgcccctgctccagccatggtatcagctctggcccaggccccagcccctgtcccagtcctagccccaggccctcctcaggctgtggccccacctgcccccaagcccacccaggctggggaaggaacgctgtcagaggccctgctgcagctgcagtttgatgatgaagacctgggggccttgcttggcaacagcacagacccagctgtgttcacagacctggcatccgtcgacaactccgagtttcagcagctgctgaaccagggcatacctgtggccccccacacaactgagcccatgctgatggagtaccctgaggctataactcgcctagtgacaggggcccagaggccccccgacccagctcctgctccactgggggccccggggctccccaatggcctcctttcaggagatgaagacttctcctccattgcggacatggacttctcagccctgctgagtcagatcagctccagtgggcagggaggaggtggaagcgaccaaagcacctttgacattttgcaggatttggagttttcttctgggtccccaggtaaagagacgaatgagagtccttggagatcagacctgttgatagatgaaaactgtttgctttctcctctggcgggagaagacgattcattccttttggaaggaaactcgaatgaggac

SEQ ID NO: 165 - DNA, 2103 bp, Artificial sequence
  Synthetic construct
atggcgttgcctgtcacggcactgctccttccccttgcacttcttcttcatgcagctcgccccgagcagaaattgatctccgaagaagaccttcaggtccaactgcagcaatcaggtggaggacttgtgaaaccaggagggagtctgaggcttagctgcgcagcgagtgggtttactttctctagttacgccatgcactgggtgcgccaagcccccgggaaaggactggagtgggtcgctgttatttcatatgacgggtcaaataaatactacgccgattcagtaaagggtcgatttactatatctagggacaacagtaagaacacactttatctgcagatggatagcctgcgggcggaggacactgcagtctactattgcgcgaaggaaggagacagctcacgctggagctacgacctctggggaagggggactctcgtaacggtgtcatccggcggtggcggcagcggtggtggtggatcagggggaggggggtctcagtcagcactcacccaacccgcatccgtgtctggtagtccgggccagagtattactatctcctgtactgggacatcctccgacgttgggggctataactacgtcagctggtatcaacagcaccctggtaaggcacccaaggtaatgatctatgatgtgacaaacagacccagcggtgtttctaaccgatttagcggttcaaaatcaggtaacaccgcaagccttaccatatctggtctccaggctgaagacgaagccgactattactgcagcagctataccatagcctctacactggttgtcttcggaggaggcactaagctgactgtgctaaccacgacgccagcgccgcgaccaccaacaccggcgcccaccatcgcgtcgcagcccctgtccctgcgcccagaggcgtgctttatgtacgtggcagccgcggcatttgtacttctgtttttcgtggggtgcggtgtgcttctcagcaagaggaaacggaagcaccggaggaagaagtctagacccggagagcgcccattccagtgtcggatttgcatgcggaacttttcgagaagacacggcctggacagacatacccgtactcatacaggtgaaaaaccctttcagtgtcggatctgtatgcgaaatttctccgaccacagcagcctgaagagacatctacgtacccacaccggcagccagaagccatttcagtgtcggatctgtatgcggaacttctccgtgagacacaacctgaccagacatctacgtacgcacaccggagagaagccattccaatgccgaatatgcatgcgcaacttcagtgaccacagcaacctgagcagacacctaaaaacccacaccggttcccagaagccatttcagtgtcggatctgtatgcggaacttctcccagcgcagcagcctggtgagacatctacgtacgcacaccggagagaagccattccaatgccgaatatgcatgcgcaacttcagtgagagcggccacctgaagagacacctgcgtacgcacctgagggatgagtttcccaccatggtgtttccttctgggcagatcagccaggcctcggccttggccccggcccctccccaagtcctgccccaggctccagcccctgcccctgctccagccatggtatcagctctggcccaggccccagcccctgtcccagtcctagccccaggccctcctcaggctgtggccccacctgcccccaagcccacccaggctggggaaggaacgctgtcagaggccctgctgcagctgcagtttgatgatgaagacctgggggccttgcttggcaacagcacagacccagctgtgttcacagacctggcatccgtcgacaactccgagtttcagcagctgctgaaccagggcatacctgtggccccccacacaactgagcccatgctgatggagtaccctgaggctataactcgcctagtgacaggggcccagaggccccccgacccagctcctgctccactgggggccccggggctccccaatggcctcctttcaggagatgaagacttctcctccattgcggacatggacttctcagccctgctgagtcagatcagctcc

SEQ ID NO: 166 - DNA, 2499 bp, Artificial sequence
  Synthetic construct
atggcgttgcctgtcacggcactgctccttccccttgcacttcttcttcatgcagctcgccccgagcagaaattgatctccgaagaagaccttcaggtccaactgcagcaatcaggtggaggacttgtgaaaccaggagggagtctgaggcttagctgcgcagcgagtgggtttactttctctagttacgccatgcactgggtgcgccaagcccccgggaaaggactggagtgggtcgctgttatttcatatgacgggtcaaataaatactacgccgattcagtaaagggtcgatttactatatctagggacaacagtaagaacacactttatctgcagatggatagcctgcgggcggaggacactgcagtctactattgcgcgaaggaaggagacagctcacgctggagctacgacctctggggaagggggactctcgtaacggtgtcatccggcggtggcggcagcggtggtggtggatcagggggaggggggtctcagtcagcactcacccaacccgcatccgtgtctggtagtccgggccagagtattactatctcctgtactgggacatcctccgacgttgggggctataactacgtcagctggtatcaacagcaccctggtaaggcacccaaggtaatgatctatgatgtgacaaacagacccagcggtgtttctaaccgatttagcggttcaaaatcaggtaacaccgcaagccttaccatatctggtctccaggctgaagacgaagccgactattactgcagcagctataccatagcctctacactggttgtcttcggaggaggcactaagctgactgtgctaaccacgacgccagcgccgcgaccaccaacaccggcgcccaccatcgcgtcgcagcccctgtccctgcgcccagaggcgtgctttatgtacgtggcagccgcggcatttgtacttctgtttttcgtggggtgcggtgtgcttctcagcaagaggaaacggaagcaccggaggaagaagtctagacccggagagcgcccattccagtgtcggatttgcatgcggaacttttcgagaagacacggcctggacagacatacccgtactcatacaggtgaaaaaccctttcagtgtcggatctgtatgcgaaatttctccgaccacagcagcctgaagagacatctacgtacccacaccggcagccagaagccatttcagtgtcggatctgtatgcggaacttctccgtgagacacaacctgaccagacatctacgtacgcacaccggagagaagccattccaatgccgaatatgcatgcgcaacttcagtgaccacagcaacctgagcagacacctaaaaacccacaccggttcccagaagccatttcagtgtcggatctgtatgcggaacttctcccagcgcagcagcctggtgagacatctacgtacgcacaccggagagaagccattccaatgccgaatatgcatgcgcaacttcagtgagagcggccacctgaagagacacctgcgtacgcacctgagggatgagtttcccaccatggtgtttccttctgggcagatcagccaggcctcggccttggccccggcccctccccaagtcctgccccaggctccagcccctgcccctgctccagccatggtatcagctctggcccaggccccagcccctgtcccagtcctagccccaggccctcctcaggctgtggccccacctgcccccaagcccacccaggctggggaaggaacgctgtcagaggccctgctgcagctgcagtttgatgatgaagacctgggggccttgcttggcaacagcacagacccagctgtgttcacagacctggcatccgtcgacaactccgagtttcagcagctgctgaaccagggcatacctgtggccccccacacaactgagcccatgctgatggagtaccctgaggctataactcgcctagtgacaggggcccagaggccccccgacccagctcctgctccactgggggccccggggctccccaatggcctcctttcaggagatgaagacttctcctccattgcggacatggacttctcagccctgctgagtcagatcagctccagtgggcagggaggaggtggaagcggcttcagcgtggacaccagtgccctgctggacctgttcagcccctcggtgaccgtgcccgacatgagcctgcctgaccttgacagcagcctggccagtatccaagagctcctgtctccccaggagccccccaggcctcccgaggcagagaacagcagcccggattcagggaagcagctggtgcactacacagcgcagccgctgttcctgctggaccccggctccgtggacaccgggagcaacgacctgccggtgctgtttgagctgggagagggctcctacttctccgaaggggacggcttcgccgaggaccccaccatctccctgctgacaggctcggagcctcccaaagccaaggaccccactgtctcc

SEQ ID NO: 167 - DNA, 2301 bp, Artificial sequence
  Synthetic construct
atggcgttgcctgtcacggcactgctccttccccttgcacttcttcttcatgcagctcgccccgagcagaaattgatctccgaagaagaccttcaggtccaactgcagcaatcaggtggaggacttgtgaaaccaggagggagtctgaggcttagctgcgcagcgagtgggtttactttctctagttacgccatgcactgggtgcgccaagcccccgggaaaggactggagtgggtcgctgttatttcatatgacgggtcaaataaatactacgccgattcagtaaagggtcgatttactatatctagggacaacagtaagaacacactttatctgcagatggatagcctgcgggcggaggacactgcagtctactattgcgcgaaggaaggagacagctcacgctggagctacgacctctggggaagggggactctcgtaacggtgtcatccggcggtggcggcagcggtggtggtggatcagggggaggggggtctcagtcagcactcacccaacccgcatccgtgtctggtagtccgggccagagtattactatctcctgtactgggacatcctccgacgttgggggctataactacgtcagctggtatcaacagcaccctggtaaggcacccaaggtaatgatctatgatgtgacaaacagacccagcggtgtttctaaccgatttagcggttcaaaatcaggtaacaccgcaagccttaccatatctggtctccaggctgaagacgaagccgactattactgcagcagctataccatagcctctacactggttgtcttcggaggaggcactaagctgactgtgctaaccacgacgccagcgccgcgaccaccaacaccggcgcccaccatcgcgtcgcagcccctgtccctgcgcccagaggcgtgctttatgtacgtggcagccgcggcatttgtacttctgtttttcgtggggtgcggtgtgcttctcagcaagaggaaacggaagcaccggaggaagaagtctagacccggagagcgcccattccagtgtcggatttgcatgcggaacttttcgagaagacacggcctggacagacatacccgtactcatacaggtgaaaaaccctttcagtgtcggatctgtatgcgaaatttctccgaccacagcagcctgaagagacatctacgtacccacaccggcagccagaagccatttcagtgtcggatctgtatgcggaacttctccgtgagacacaacctgaccagacatctacgtacgcacaccggagagaagccattccaatgccgaatatgcatgcgcaacttcagtgaccacagcaacctgagcagacacctaaaaacccacaccggttcccagaagccatttcagtgtcggatctgtatgcggaacttctcccagcgcagcagcctggtgagacatctacgtacgcacaccggagagaagccattccaatgccgaatatgcatgcgcaacttcagtgagagcggccacctgaagagacacctgcgtacgcacctgagggatgagtttcccaccatggtgtttccttctgggcagatcagccaggcctcggccttggccccggcccctccccaagtcctgccccaggctccagcccctgcccctgctccagccatggtatcagctctggcccaggccccagcccctgtcccagtcctagccccaggccctcctcaggctgtggccccacctgcccccaagcccacccaggctggggaaggaacgctgtcagaggccctgctgcagctgcagtttgatgatgaagacctgggggccttgcttggcaacagcacagacccagctgtgttcacagacctggcatccgtcgacaactccgagtttcagcagctgctgaaccagggcatacctgtggccccccacacaactgagcccatgctgatggagtaccctgaggctataactcgcctagtgacaggggcccagaggccccccgacccagctcctgctccactgggggccccggggctccccaatggcctcctttcaggagatgaagacttctcctccattgcggacatggacttctcagccctgctgagtcagatcagctccagtgggcagggaggaggtggaagcgaccaaagcacctttgacattttgcaggatttggagttttcttctgggtccccaggtaaagagacgaatgagagtccttggagatcagacctgttgatagatgaaaactgtttgctttctcctctggcgggagaagacgattcattccttttggaaggaaactcgaatgaggac

SEQ ID NO: 168 - DNA, 10923 bp, Artificial sequence
  Synthetic construct
tggaagggctaattcactcccaaagaagacaagatatccttgatctgtggatctaccacacacaaggctacttccctgattagcagaactacacaccagggccaggggtcagatatccactgacctttggatggtgctacaagctagtaccagttgagccagataaggtagaagaggccaataaaggagagaacaccagcttgttacaccctgtgagcctgcatgggatggatgacccggagagagaagtgttagagtggaggtttgacagccgcctagcatttcatcacgtggcccgagagctgcatccggagtacttcaagaactgctgatatcgagcttgctacaagggactttccgctggggactttccagggaggcgtggcctgggcgggactggggagtggcgagccctcagatcctgcatataagcagctgctttttgcctgtactgggtctctctggttagaccagatctgagcctgggagctctctggctaactagggaacccactgcttaagcctcaataaagcttgccttgagtgcttcaagtagtgtgtgcccgtctgttgtgtgactctggtaactagagatccctcagacccttttagtcagtgtggaaaatctctagcagtggcgcccgaacagggacttgaaagcgaaagggaaaccagaggagctctctcgacgcaggactcggcttgctgaagcgcgcacggcaagaggcgaggggcggcgactggtgagtacgccaaaaattttgactagcggaggctagaaggagagagatgggtgcgagagcgtcagtattaagcgggggagaattagatcgcgatgggaaaaaattcggttaaggccagggggaaagaaaaaatataaattaaaacatatagtatgggcaagcagggagctagaacgattcgcagttaatcctggcctgttagaaacatcagaaggctgtagacaaatactgggacagctacaaccatcccttcagacaggatcagaagaacttagatcattatataatacagtagcaaccctctattgtgtgcatcaaaggatagagataaaagacaccaaggaagctttagacaagatagaggaagagcaaaacaaaagtaagaccaccgcacagcaagcggccggtgatcttcagacctggacgatatatatgagggacaattggagaagtgaattatataaatataaagtagtaaaaattgaaccattaggagtagcacccaccaaggcaaagagaagagtggtgcagagagaaaaaagagcagtgggaataggagctttgttccttgggttcttgggagcagcaggaagcactatgggcgcagcgtcaatgacgctgacggtacaggccagacaattattgtctggtatagtgcagcagcagaacaatttgctgagggctattgaggcgcaacagcatctgttgcaactcacagtctggggcatcaagcagctccaggcaagaatcctggctgtggaaagatacctaaaggatcaacagctcctggggatttggggttgctctggaaaactcatttgcaccactgctgtgccttggaatgctagttggagtaataaatctctggaacagatttggaatcacacgacctggatggagtgggacagagaaattaacaattacacaagcttaatacactccttaattgaagaatcgcaaaaccagcaagaaaagaatgaacaagaattattggaattagataaatgggcaagtttgtggaattggtttaacataacaaattggctgtggtatataaaattattcataatgatagtaggaggcttggtaggtttaagaatagtttttgctgtactttctatagtgaatagagttaggcagggatattcaccattatcgtttcagacccacctcccaaccccgaggggacccgacaggcccgaaggaatagaagaagaaggtggagagagagacagagacagatccattcgattagtgaacggatctcgacggtatcgccaaatggcagtattcatccacaattttaaaagaaaaggggggattggggggtacagtgcaggggaaagaatagtagacataatagcaacagacatacaaactaaagaattacaaaaacaaattacaaaaattcaaaattttcgggtttattacagggacagcagagatccagtttggatcgataagcttgatatcgaattcgggtaggggaggcgcttttcccaaggcagtctggagcatgcgctttagcagccccgctgggcacttggcgctacacaagtggcctctggcctcgcacacattccacatccaccggtaggcgccaaccggctccgttctttggtggccccttcgcgccaccttctactcctcccctagtcaggaagttcccccccgccccgcagctcgcgtcgtgcaggacgtgacaaatggaagtagcacgtctcactagtctcgtgcagatggacagcaccgctgagcaatggaagcgggtaggcctttggggcagcggccaatagcagctttgctccttcgctttctgggctcagaggctgggaaggggtgggtccgggggcgggctcaggggcgggctcaggggcggggcgggcgcccgaaggtcctccggaggcccggcattctgcacgcttcaaaagcgcacgtctgccgcgctgttctcctcttcctcatctccgggcctttcgacctgcagcccaaggccaccatggccttaccagtgaccgccttgctcctgccgctggccttgctgctccacgccgccaggccggagcagaagctgatcagcgaggaggacctggacatccagatgacacagactacatcctccctgtctgcctctctgggagacagagtcaccatcagttgcagggcaagtcaggacattagtaaatatttaaattggtatcagcagaaaccagatggaactgttaaactcctgatctaccatacatcaagattacactcaggagtcccatcaaggttcagtggcagtgggtctggaacagattattctctcaccattagcaacctggagcaagaagatattgccacttacttttgccaacagggtaatacgcttccgtacacgttcggaggggggaccaagctggagatcacaggtggcggtggctcgggcggtggtgggtcgggtggcggcggatctgaggtgaaactgcaggagtcaggacctggcctggtggcgccctcacagagcctgtccgtcacatgcactgtctcaggggtctcattacccgactatggtgtaagctggattcgccagcctccacgaaagggtctggagtggctgggagtaatatggggtagtgaaaccacatactataattcagctctcaaatccagactgaccatcatcaaggacaactccaagagccaagttttcttaaaaatgaacagtctgcaaactgatgacacagccatttactactgtgccaaacattattactacggtggtagctatgctatggactactggggccaaggaacctcagtcaccgtctcctcaaccacgacgccagcgccgcgaccaccaacaccggcgcccaccatcgcgtcgcagcccctgtccctgcgcccagaggcgtgctttatgtacgtggcagccgcggcatttgtacttctgtttttcgtggggtgcggtgtgcttctcagcaagaggaaacggaagcaccccaagaaaaagaggaaggtgtctagaccaggcgaacgaccgtttcaatgccggatatgtatgaggaacttctcccagcagaccaatctcacgcggcacacccgaacacatacaggagaaaagccattccaatgtcgaatttgtatgcgcaatttttcacagaaggctaacctcggcgttcacctccgcacacatactggttcacagaagccctttcagtgcaggatttgtatgcgcaactttagcgatcactcatctctgaaacgccacactagaacgcatacaggtgagaagcctttccagtgtcgcatctgtatgcggaacttcagccgagcggatatgcttagacgccatttgcgaactcacaccggttctcaaaaaccttttcagtgccgaatttgtatgcgcaacttcagcgagaaacagaacctggcacgccacacgcgcacgcacaccggggaaaaaccgtttcaatgtcgaatctgcatgcgcaattttagcgacccctctaatcttaggaggcatctgcgcacacacttgcgggatgagtttcccaccatggtgtttccttctgggcagatcagccaggcctcggccttggccccggcccctccccaagtcctgccccaggctccagcccctgcccctgctccagccatggtatcagctctggcccaggccccagcccctgtcccagtcctagccccaggccctcctcaggctgtggccccacctgcccccaagcccacccaggctggggaaggaacgctgtcagaggccctgctgcagctgcagtttgatgatgaagacctgggggccttgcttggcaacagcacagacccagctgtgttcacagacctggcatccgtcgacaactccgagtttcagcagctgctgaaccagggcatacctgtggccccccacacaactgagcccatgctgatggagtaccctgaggctataactcgcctagtgacaggggcccagaggccccccgacccagctcctgctccactgggggccccggggctccccaatggcctcctttcaggagatgaagacttctcctccattgcggacatggacttctcagccctgctgagtcagatcagctcctaagcggccgctaatcaacctctggattacaaaatttgtgaaagattgactggtattcttaactatgttgctccttttacgctatgtggatacgctgctttaatgcctttgtatcatgctattgcttcccgtatggctttcattttctcctccttgtataaatcctggttgctgtctctttatgaggagttgtggcccgttgtcaggcaacgtggcgtggtgtgcactgtgtttgctgacgcaacccccactggttggggcattgccaccacctgtcagctcctttccgggactttcgctttccccctccctattgccacggcggaactcatcgccgcctgccttgcccgctgctggacaggggctcggctgttgggcactgacaattccgtggtgttgtcggggaaatcatcgtcctttccttggctgctcgcctgtgttgccacctggattctgcgcgggacgtccttctgctacgtcccttcggccctcaatccagcggaccttccttcccgcggcctgctgccggctctgcggcctcttccgcgtcttcgccttcgccctcagacgagtcggatctccctttgggccgcctccccgcatgcgatcgcttagccactttttaaaagaaaaggggggactggaagggctaattcactcccaacgaagacaagatctgctttttgcttgtactgggtctctctggttagaccagatctgagcctgggagctctctggctaactagggaacccactgcttaagcctcaataaagcttgccttgagtgcttcaagtagtgtgtgcccgtctgttgtgtgactctggtaactagagatccctcagacccttttagtcagtgtggaaaatctctagcagcatctagaattaattccgtgtattctatagtgtcacctaaatcgtatgtgtatgatacataaggttatgtattaattgtagccgcgttctaacgacaatatgtacaagcctaattgtgtagcatctggcttactgaagcagaccctatcatctctctcgtaaactgccgtcagagtcggtttggttggacgaaccttctgagtttctggtaacgccgtcccgcacccggaaatggtcagcgaaccaatcagcagggtcatcgctagccagatcctctacgccggacgcatcgtggccggcatcaccggcgccacaggtgcggttgctggcgcctatatcgccgacatcaccgatggggaagatcgggctcgccacttcgggctcatgagcgcttgtttcggcgtgggtatggtggcaggccccgtggccgggggactgttgggcgccatctccttgcatgcaccattccttgcggcggcggtgctcaacggcctcaacctactactgggctgcttcctaatgcaggagtcgcataagggagagcgtcgaatggtgcactctcagtacaatctgctctgatgccgcatagttaagccagccccgacacccgccaacacccgctgacgcgccctgacgggcttgtctgctcccggcatccgcttacagacaagctgtgaccgtctccgggagctgcatgtgtcagaggttttcaccgtcatcaccgaaacgcgcgagacgaaagggcctcgtgatacgcctatttttataggttaatgtcatgataataatggtttcttagacgtcaggtggcacttttcggggaaatgtgcgcggaacccctatttgtttatttttctaaatacattcaaatatgtatccgctcatgagacaataaccctgataaatgcttcaataatattgaaaaaggaagagtatgagtattcaacatttccgtgtcgcccttattcccttttttgcggcattttgccttcctgtttttgctcacccagaaacgctggtgaaagtaaaagatgctgaagatcagttgggtgcacgagtgggttacatcgaactggatctcaacagcggtaagatccttgagagttttcgccccgaagaacgttttccaatgatgagcacttttaaagttctgctatgtggcgcggtattatcccgtattgacgccgggcaagagcaactcggtcgccgcatacactattctcagaatgacttggttgagtactcaccagtcacagaaaagcatcttacggatggcatgacagtaagagaattatgcagtgctgccataaccatgagtgataacactgcggccaacttacttctgacaacgatcggaggaccgaaggagctaaccgcttttttgcacaacatgggggatcatgtaactcgccttgatcgttgggaaccggagctgaatgaagccataccaaacgacgagcgtgacaccacgatgcctgtagcaatggcaacaacgttgcgcaaactattaactggcgaactacttactctagcttcccggcaacaattaatagactggatggaggcggataaagttgcaggaccacttctgcgctcggcccttccggctggctggtttattgctgataaatctggagccggtgagcgtgggtctcgcggtatcattgcagcactggggccagatggtaagccctcccgtatcgtagttatctacacgacggggagtcaggcaactatggatgaacgaaatagacagatcgctgagataggtgcctcactgattaagcattggtaactgtcagaccaagtttactcatatatactttagattgatttaaaacttcatttttaatttaaaaggatctaggtgaagatcctttttgataatctcatgaccaaaatcccttaacgtgagttttcgttccactgagcgtcagaccccgtagaaaagatcaaaggatcttcttgagatcctttttttctgcgcgtaatctgctgcttgcaaacaaaaaaaccaccgctaccagcggtggtttgtttgccggatcaagagctaccaactctttttccgaaggtaactggcttcagcagagcgcagataccaaatactgttcttctagtgtagccgtagttaggccaccacttcaagaactctgtagcaccgcctacatacctcgctctgctaatcctgttaccagtggctgctgccagtggcgataagtcgtgtcttaccgggttggactcaagacgatagttaccggataaggcgcagcggtcgggctgaacggggggttcgtgcacacagcccagcttggagcgaacgacctacaccgaactgagatacctacagcgtgagctatgagaaagcgccacgcttcccgaagggagaaaggcggacaggtatccggtaagcggcagggtcggaacaggagagcgcacgagggagcttccagggggaaacgcctggtatctttatagtcctgtcgggtttcgccacctctgacttgagcgtcgatttttgtgatgctcgtcaggggggcggagcctatggaaaaacgccagcaacgcggcctttttacggttcctggccttttgctggccttttgctcacatgttctttcctgcgttatcccctgattctgtggataaccgtattaccgcctttgagtgagctgataccgctcgccgcagccgaacgaccgagcgcagcgagtcagtgagcgaggaagcggaagagcgcccaatacgcaaaccgcctctccccgcgcgttggccgattcattaatgcagctgtggaatgtgtgtcagttagggtgtggaaagtccccaggctccccagcaggcagaagtatgcaaagcatgcatctcaattagtcagcaaccaggtgtggaaagtccccaggctccccagcaggcagaagtatgcaaagcatgcatctcaattagtcagcaaccatagtcccgcccctaactccgcccatcccgcccctaactccgcccagttccgcccattctccgccccatcgctgactaattttttttatttatgcagaggccgaggccgcctcggcctctgagctattccagaagtagtgaggaggcttttttggaggcctaggcttttgcaaaaagcttggacacaagacaggcttgcgagatatgtttgagaataccactttatcccgcgtcagggagaggcagtgcgtaaaaagacgcggactcatgtgaaatactggtttttagtgcgccagatctctataatctcgcgcaacctattttcccctcgaacactttttaagccgtagataaacaggctgggacacttcacatgagcgaaaaatacatcgtcacctgggacatgttgcagatccatgcacgtaaactcgcaagccgactgatgccttctgaacaatggaaaggcattattgccgtaagccgtggcggtctgtaccgggtgcgttactggcgcgtgaactgggtattcgtcatgtcgataccgtttgtatttccagctacgatcacgacaaccagcgcgagcttaaagtgctgaaacgcgcagaaggcgatggcgaaggcttcatcgttattgatgacctggtggataccggtggtactgcggttgcgattcgtgaaatgtatccaaaagcgcactttgtcaccatcttcgcaaaaccggctggtcgtccgctggttgatgactatgttgttgatatcccgcaagatacctggattgaacagccgtgggatatgggcgtcgtattcgtcccgccaatctccggtcgctaatcttttcaacgcctggcactgccgggcgttgttctttttaacttcaggcgggttacaatagtttccagtaagtattctggaggctgcatccatgacacaggcaaacctgagcgaaaccctgttcaaaccccgctttaaacatcctgaaacctcgacgctagtccgccgctttaatcacggcgcacaaccgcctgtgcagtcggcccttgatggtaaaaccatccctcactggtatcgcatgattaaccgtctgatgtggatctggcgcggcattgacccacgcgaaatcctcgacgtccaggcacgtattgtgatgagcgatgccgaacgtaccgacgatgatttatacgatacggtgattggctaccgtggcggcaactggatttatgagtgggccccggatctttgtgaaggaaccttacttctgtggtgtgacataattggacaaactacctacagagatttaaagctctaaggtaaatataaaatttttaagtgtataatgtgttaaactactgattctaattgtttgtgtattttagattccaacctatggaactgatgaatgggagcagtggtggaatgcctttaatgaggaaaacctgttttgctcagaagaaatgccatctagtgatgatgaggctactgctgactctcaacattctactcctccaaaaaagaagagaaaggtagaagaccccaaggactttccttcagaattgctaagttttttgagtcatgctgtgtttagtaatagaactcttgcttgctttgctatttacaccacaaaggaaaaagctgcactgctatacaagaaaattatggaaaaatattctgtaacctttataagtaggcataacagttataatcataacatactgttttttcttactccacacaggcatagagtgtctgctattaataactatgctcaaaaattgtgtacctttagctttttaatttgtaaaggggttaataaggaatatttgatgtatagtgccttgactagagatcataatcagccataccacatttgtagaggttttacttgctttaaaaaacctcccacacctccccctgaacctgaaacataaaatgaatgcaattgttgttgttaacttgtttattgcagcttataatggttacaaataaagcaatagcatcacaaatttcacaaataaagcatttttttcactgcattctagttgtggtttgtccaaactcatcaatgtatcttatcatgtctggatcaactggataactcaagctaaccaaaatcatcccaaacttcccaccccataccctattaccactgccaattacctagtggtttcatttactctaaacctgtgattcctctgaattattttcattttaaagaaattgtatttgttaaatatgtactacaaacttagtagt

SEQ ID NO: 169 - DNA, 10506 bp, Artificial sequence
  Synthetic construct
tggaagggctaattcactcccaaagaagacaagatatccttgatctgtggatctaccacacacaaggctacttccctgattagcagaactacacaccagggccaggggtcagatatccactgacctttggatggtgctacaagctagtaccagttgagccagataaggtagaagaggccaataaaggagagaacaccagcttgttacaccctgtgagcctgcatgggatggatgacccggagagagaagtgttagagtggaggtttgacagccgcctagcatttcatcacgtggcccgagagctgcatccggagtacttcaagaactgctgatatcgagcttgctacaagggactttccgctggggactttccagggaggcgtggcctgggcgggactggggagtggcgagccctcagatcctgcatataagcagctgctttttgcctgtactgggtctctctggttagaccagatctgagcctgggagctctctggctaactagggaacccactgcttaagcctcaataaagcttgccttgagtgcttcaagtagtgtgtgcccgtctgttgtgtgactctggtaactagagatccctcagacccttttagtcagtgtggaaaatctctagcagtggcgcccgaacagggacttgaaagcgaaagggaaaccagaggagctctctcgacgcaggactcggcttgctgaagcgcgcacggcaagaggcgaggggcggcgactggtgagtacgccaaaaattttgactagcggaggctagaaggagagagatgggtgcgagagcgtcagtattaagcgggggagaattagatcgcgatgggaaaaaattcggttaaggccagggggaaagaaaaaatataaattaaaacatatagtatgggcaagcagggagctagaacgattcgcagttaatcctggcctgttagaaacatcagaaggctgtagacaaatactgggacagctacaaccatcccttcagacaggatcagaagaacttagatcattatataatacagtagcaaccctctattgtgtgcatcaaaggatagagataaaagacaccaaggaagctttagacaagatagaggaagagcaaaacaaaagtaagaccaccgcacagcaagcggccggtgatcttcagacctggacgatatatatgagggacaattggagaagtgaattatataaatataaagtagtaaaaattgaaccattaggagtagcacccaccaaggcaaagagaagagtggtgcagagagaaaaaagagcagtgggaataggagctttgttccttgggttcttgggagcagcaggaagcactatgggcgcagcgtcaatgacgctgacggtacaggccagacaattattgtctggtatagtgcagcagcagaacaatttgctgagggctattgaggcgcaacagcatctgttgcaactcacagtctggggcatcaagcagctccaggcaagaatcctggctgtggaaagatacctaaaggatcaacagctcctggggatttggggttgctctggaaaactcatttgcaccactgctgtgccttggaatgctagttggagtaataaatctctggaacagatttggaatcacacgacctggatggagtgggacagagaaattaacaattacacaagcttaatacactccttaattgaagaatcgcaaaaccagcaagaaaagaatgaacaagaattattggaattagataaatgggcaagtttgtggaattggtttaacataacaaattggctgtggtatataaaattattcataatgatagtaggaggcttggtaggtttaagaatagtttttgctgtactttctatagtgaatagagttaggcagggatattcaccattatcgtttcagacccacctcccaaccccgaggggacccgacaggcccgaaggaatagaagaagaaggtggagagagagacagagacagatccattcgattagtgaacggatctcgacggtatcgccaaatggcagtattcatccacaattttaaaagaaaaggggggattggggggtacagtgcaggggaaagaatagtagacataatagcaacagacatacaaactaaagaattacaaaaacaaattacaaaaattcaaaattttcgggtttattacagggacagcagagatccagtttggatcgataagcttgatatcgaattcgggtaggggaggcgcttttcccaaggcagtctggagcatgcgctttagcagccccgctgggcacttggcgctacacaagtggcctctggcctcgcacacattccacatccaccggtaggcgccaaccggctccgttctttggtggccccttcgcgccaccttctactcctcccctagtcaggaagttcccccccgccccgcagctcgcgtcgtgcaggacgtgacaaatggaagtagcacgtctcactagtctcgtgcagatggacagcaccgctgagcaatggaagcgggtaggcctttggggcagcggccaatagcagctttgctccttcgctttctgggctcagaggctgggaaggggtgggtccgggggcgggctcaggggcgggctcaggggcggggcgggcgcccgaaggtcctccggaggcccggcattctgcacgcttcaaaagcgcacgtctgccgcgctgttctcctcttcctcatctccgggcctttcgacctgcagcccaaggccaccatggccttaccagtgaccgccttgctcctgccgctggccttgctgctccacgccgccaggccggagcagaagctgatcagcgaggaggacctggacatccagatgacacagactacatcctccctgtctgcctctctgggagacagagtcaccatcagttgcagggcaagtcaggacattagtaaatatttaaattggtatcagcagaaaccagatggaactgttaaactcctgatctaccatacatcaagattacactcaggagtcccatcaaggttcagtggcagtgggtctggaacagattattctctcaccattagcaacctggagcaagaagatattgccacttacttttgccaacagggtaatacgcttccgtacacgttcggaggggggaccaagctggagatcacaggtggcggtggctcgggcggtggtgggtcgggtggcggcggatctgaggtgaaactgcaggagtcaggacctggcctggtggcgccctcacagagcctgtccgtcacatgcactgtctcaggggtctcattacccgactatggtgtaagctggattcgccagcctccacgaaagggtctggagtggctgggagtaatatggggtagtgaaaccacatactataattcagctctcaaatccagactgaccatcatcaaggacaactccaagagccaagttttcttaaaaatgaacagtctgcaaactgatgacacagccatttactactgtgccaaacattattactacggtggtagctatgctatggactactggggccaaggaacctcagtcaccgtctcctcaaccacgacgccagcgccgcgaccaccaacaccggcgcccaccatcgcgtcgcagcccctgtccctgcgcccagaggcgtgctttatgtacgtggcagccgcggcatttgtacttctgtttttcgtggggtgcggtgtgcttctcagcaagaggaaacggaagcaccccaagaaaaagaggaaggtgtctagaccaggcgaacgaccgtttcaatgccggatatgtatgaggaacttctcccagcagaccaatctcacgcggcacacccgaacacatacaggagaaaagccattccaatgtcgaatttgtatgcgcaatttttcacagaaggctaacctcggcgttcacctccgcacacatactggttcacagaagccctttcagtgcaggatttgtatgcgcaactttagcgatcactcatctctgaaacgccacactagaacgcatacaggtgagaagcctttccagtgtcgcatctgtatgcggaacttcagccgagcggatatgcttagacgccatttgcgaactcacaccggttctcaaaaaccttttcagtgccgaatttgtatgcgcaacttcagcgagaaacagaacctggcacgccacacgcgcacgcacaccggggaaaaaccgtttcaatgtcgaatctgcatgcgcaattttagcgacccctctaatcttaggaggcatctgcgcacacacttgcgggatgccctggacgacttcgacctggatatgctgggcagcgacgccctggatgattttgatctggacatgctgggatctgacgctctggacgatttcgatctcgacatgttgggatcagatgcactggatgactttgacctggacatgctcggatcatgagcggccgctaatcaacctctggattacaaaatttgtgaaagattgactggtattcttaactatgttgctccttttacgctatgtggatacgctgctttaatgcctttgtatcatgctattgcttcccgtatggctttcattttctcctccttgtataaatcctggttgctgtctctttatgaggagttgtggcccgttgtcaggcaacgtggcgtggtgtgcactgtgtttgctgacgcaacccccactggttggggcattgccaccacctgtcagctcctttccgggactttcgctttccccctccctattgccacggcggaactcatcgccgcctgccttgcccgctgctggacaggggctcggctgttgggcactgacaattccgtggtgttgtcggggaaatcatcgtcctttccttggctgctcgcctgtgttgccacctggattctgcgcgggacgtccttctgctacgtcccttcggccctcaatccagcggaccttccttcccgcggcctgctgccggctctgcggcctcttccgcgtcttcgccttcgccctcagacgagtcggatctccctttgggccgcctccccgcatgcgatcgcttagccactttttaaaagaaaaggggggactggaagggctaattcactcccaacgaagacaagatctgctttttgcttgtactgggtctctctggttagaccagatctgagcctgggagctctctggctaactagggaacccactgcttaagcctcaataaagcttgccttgagtgcttcaagtagtgtgtgcccgtctgttgtgtgactctggtaactagagatccctcagacccttttagtcagtgtggaaaatctctagcagcatctagaattaattccgtgtattctatagtgtcacctaaatcgtatgtgtatgatacataaggttatgtattaattgtagccgcgttctaacgacaatatgtacaagcctaattgtgtagcatctggcttactgaagcagaccctatcatctctctcgtaaactgccgtcagagtcggtttggttggacgaaccttctgagtttctggtaacgccgtcccgcacccggaaatggtcagcgaaccaatcagcagggtcatcgctagccagatcctctacgccggacgcatcgtggccggcatcaccggcgccacaggtgcggttgctggcgcctatatcgccgacatcaccgatggggaagatcgggctcgccacttcgggctcatgagcgcttgtttcggcgtgggtatggtggcaggccccgtggccgggggactgttgggcgccatctccttgcatgcaccattccttgcggcggcggtgctcaacggcctcaacctactactgggctgcttcctaatgcaggagtcgcataagggagagcgtcgaatggtgcactctcagtacaatctgctctgatgccgcatagttaagccagccccgacacccgccaacacccgctgacgcgccctgacgggcttgtctgctcccggcatccgcttacagacaagctgtgaccgtctccgggagctgcatgtgtcagaggttttcaccgtcatcaccgaaacgcgcgagacgaaagggcctcgtgatacgcctatttttataggttaatgtcatgataataatggtttcttagacgtcaggtggcacttttcggggaaatgtgcgcggaacccctatttgtttatttttctaaatacattcaaatatgtatccgctcatgagacaataaccctgataaatgcttcaataatattgaaaaaggaagagtatgagtattcaacatttccgtgtcgcccttattcccttttttgcggcattttgccttcctgtttttgctcacccagaaacgctggtgaaagtaaaagatgctgaagatcagttgggtgcacgagtgggttacatcgaactggatctcaacagcggtaagatccttgagagttttcgccccgaagaacgttttccaatgatgagcacttttaaagttctgctatgtggcgcggtattatcccgtattgacgccgggcaagagcaactcggtcgccgcatacactattctcagaatgacttggttgagtactcaccagtcacagaaaagcatcttacggatggcatgacagtaagagaattatgcagtgctgccataaccatgagtgataacactgcggccaacttacttctgacaacgatcggaggaccgaaggagctaaccgcttttttgcacaacatgggggatcatgtaactcgccttgatcgttgggaaccggagctgaatgaagccataccaaacgacgagcgtgacaccacgatgcctgtagcaatggcaacaacgttgcgcaaactattaactggcgaactacttactctagcttcccggcaacaattaatagactggatggaggcggataaagttgcaggaccacttctgcgctcggcccttccggctggctggtttattgctgataaatctggagccggtgagcgtgggtctcgcggtatcattgcagcactggggccagatggtaagccctcccgtatcgtagttatctacacgacggggagtcaggcaactatggatgaacgaaatagacagatcgctgagataggtgcctcactgattaagcattggtaactgtcagaccaagtttactcatatatactttagattgatttaaaacttcatttttaatttaaaaggatctaggtgaagatcctttttgataatctcatgaccaaaatcccttaacgtgagttttcgttccactgagcgtcagaccccgtagaaaagatcaaaggatcttcttgagatcctttttttctgcgcgtaatctgctgcttgcaaacaaaaaaaccaccgctaccagcggtggtttgtttgccggatcaagagctaccaactctttttccgaaggtaactggcttcagcagagcgcagataccaaatactgttcttctagtgtagccgtagttaggccaccacttcaagaactctgtagcaccgcctacatacctcgctctgctaatcctgttaccagtggctgctgccagtggcgataagtcgtgtcttaccgggttggactcaagacgatagttaccggataaggcgcagcggtcgggctgaacggggggttcgtgcacacagcccagcttggagcgaacgacctacaccgaactgagatacctacagcgtgagctatgagaaagcgccacgcttcccgaagggagaaaggcggacaggtatccggtaagcggcagggtcggaacaggagagcgcacgagggagcttccagggggaaacgcctggtatctttatagtcctgtcgggtttcgccacctctgacttgagcgtcgatttttgtgatgctcgtcaggggggcggagcctatggaaaaacgccagcaacgcggcctttttacggttcctggccttttgctggccttttgctcacatgttctttcctgcgttatcccctgattctgtggataaccgtattaccgcctttgagtgagctgataccgctcgccgcagccgaacgaccgagcgcagcgagtcagtgagcgaggaagcggaagagcgcccaatacgcaaaccgcctctccccgcgcgttggccgattcattaatgcagctgtggaatgtgtgtcagttagggtgtggaaagtccccaggctccccagcaggcagaagtatgcaaagcatgcatctcaattagtcagcaaccaggtgtggaaagtccccaggctccccagcaggcagaagtatgcaaagcatgcatctcaattagtcagcaaccatagtcccgcccctaactccgcccatcccgcccctaactccgcccagttccgcccattctccgccccatcgctgactaattttttttatttatgcagaggccgaggccgcctcggcctctgagctattccagaagtagtgaggaggcttttttggaggcctaggcttttgcaaaaagcttggacacaagacaggcttgcgagatatgtttgagaataccactttatcccgcgtcagggagaggcagtgcgtaaaaagacgcggactcatgtgaaatactggtttttagtgcgccagatctctataatctcgcgcaacctattttcccctcgaacactttttaagccgtagataaacaggctgggacacttcacatgagcgaaaaatacatcgtcacctgggacatgttgcagatccatgcacgtaaactcgcaagccgactgatgccttctgaacaatggaaaggcattattgccgtaagccgtggcggtctgtaccgggtgcgttactggcgcgtgaactgggtattcgtcatgtcgataccgtttgtatttccagctacgatcacgacaaccagcgcgagcttaaagtgctgaaacgcgcagaaggcgatggcgaaggcttcatcgttattgatgacctggtggataccggtggtactgcggttgcgattcgtgaaatgtatccaaaagcgcactttgtcaccatcttcgcaaaaccggctggtcgtccgctggttgatgactatgttgttgatatcccgcaagatacctggattgaacagccgtgggatatgggcgtcgtattcgtcccgccaatctccggtcgctaatcttttcaacgcctggcactgccgggcgttgttctttttaacttcaggcgggttacaatagtttccagtaagtattctggaggctgcatccatgacacaggcaaacctgagcgaaaccctgttcaaaccccgctttaaacatcctgaaacctcgacgctagtccgccgctttaatcacggcgcacaaccgcctgtgcagtcggcccttgatggtaaaaccatccctcactggtatcgcatgattaaccgtctgatgtggatctggcgcggcattgacccacgcgaaatcctcgacgtccaggcacgtattgtgatgagcgatgccgaacgtaccgacgatgatttatacgatacggtgattggctaccgtggcggcaactggatttatgagtgggccccggatctttgtgaaggaaccttacttctgtggtgtgacataattggacaaactacctacagagatttaaagctctaaggtaaatataaaatttttaagtgtataatgtgttaaactactgattctaattgtttgtgtattttagattccaacctatggaactgatgaatgggagcagtggtggaatgcctttaatgaggaaaacctgttttgctcagaagaaatgccatctagtgatgatgaggctactgctgactctcaacattctactcctccaaaaaagaagagaaaggtagaagaccccaaggactttccttcagaattgctaagttttttgagtcatgctgtgtttagtaatagaactcttgcttgctttgctatttacaccacaaaggaaaaagctgcactgctatacaagaaaattatggaaaaatattctgtaacctttataagtaggcataacagttataatcataacatactgttttttcttactccacacaggcatagagtgtctgctattaataactatgctcaaaaattgtgtacctttagctttttaatttgtaaaggggttaataaggaatatttgatgtatagtgccttgactagagatcataatcagccataccacatttgtagaggttttacttgctttaaaaaacctcccacacctccccctgaacctgaaacataaaatgaatgcaattgttgttgttaacttgtttattgcagcttataatggttacaaataaagcaatagcatcacaaatttcacaaataaagcatttttttcactgcattctagttgtggtttgtccaaactcatcaatgtatcttatcatgtctggatcaactggataactcaagctaaccaaaatcatcccaaacttcccaccccataccctattaccactgccaattacctagtggtttcatttactctaaacctgtgattcctctgaattattttcattttaaagaaattgtatttgttaaatatgtactacaaacttagtagt

SEQ ID NO: 170 - DNA, 10923 bp, Artificial sequence
  Synthetic construct
tggaagggctaattcactcccaaagaagacaagatatccttgatctgtggatctaccacacacaaggctacttccctgattagcagaactacacaccagggccaggggtcagatatccactgacctttggatggtgctacaagctagtaccagttgagccagataaggtagaagaggccaataaaggagagaacaccagcttgttacaccctgtgagcctgcatgggatggatgacccggagagagaagtgttagagtggaggtttgacagccgcctagcatttcatcacgtggcccgagagctgcatccggagtacttcaagaactgctgatatcgagcttgctacaagggactttccgctggggactttccagggaggcgtggcctgggcgggactggggagtggcgagccctcagatcctgcatataagcagctgctttttgcctgtactgggtctctctggttagaccagatctgagcctgggagctctctggctaactagggaacccactgcttaagcctcaataaagcttgccttgagtgcttcaagtagtgtgtgcccgtctgttgtgtgactctggtaactagagatccctcagacccttttagtcagtgtggaaaatctctagcagtggcgcccgaacagggacttgaaagcgaaagggaaaccagaggagctctctcgacgcaggactcggcttgctgaagcgcgcacggcaagaggcgaggggcggcgactggtgagtacgccaaaaattttgactagcggaggctagaaggagagagatgggtgcgagagcgtcagtattaagcgggggagaattagatcgcgatgggaaaaaattcggttaaggccagggggaaagaaaaaatataaattaaaacatatagtatgggcaagcagggagctagaacgattcgcagttaatcctggcctgttagaaacatcagaaggctgtagacaaatactgggacagctacaaccatcccttcagacaggatcagaagaacttagatcattatataatacagtagcaaccctctattgtgtgcatcaaaggatagagataaaagacaccaaggaagctttagacaagatagaggaagagcaaaacaaaagtaagaccaccgcacagcaagcggccggtgatcttcagacctggacgatatatatgagggacaattggagaagtgaattatataaatataaagtagtaaaaattgaaccattaggagtagcacccaccaaggcaaagagaagagtggtgcagagagaaaaaagagcagtgggaataggagctttgttccttgggttcttgggagcagcaggaagcactatgggcgcagcgtcaatgacgctgacggtacaggccagacaattattgtctggtatagtgcagcagcagaacaatttgctgagggctattgaggcgcaacagcatctgttgcaactcacagtctggggcatcaagcagctccaggcaagaatcctggctgtggaaagatacctaaaggatcaacagctcctggggatttggggttgctctggaaaactcatttgcaccactgctgtgccttggaatgctagttggagtaataaatctctggaacagatttggaatcacacgacctggatggagtgggacagagaaattaacaattacacaagcttaatacactccttaattgaagaatcgcaaaaccagcaagaaaagaatgaacaagaattattggaattagataaatgggcaagtttgtggaattggtttaacataacaaattggctgtggtatataaaattattcataatgatagtaggaggcttggtaggtttaagaatagtttttgctgtactttctatagtgaatagagttaggcagggatattcaccattatcgtttcagacccacctcccaaccccgaggggacccgacaggcccgaaggaatagaagaagaaggtggagagagagacagagacagatccattcgattagtgaacggatctcgacggtatcgccaaatggcagtattcatccacaattttaaaagaaaaggggggattggggggtacagtgcaggggaaagaatagtagacataatagcaacagacatacaaactaaagaattacaaaaacaaattacaaaaattcaaaattttcgggtttattacagggacagcagagatccagtttggatcgataagcttgatatcgaattcgggtaggggaggcgcttttcccaaggcagtctggagcatgcgctttagcagccccgctgggcacttggcgctacacaagtggcctctggcctcgcacacattccacatccaccggtaggcgccaaccggctccgttctttggtggccccttcgcgccaccttctactcctcccctagtcaggaagttcccccccgccccgcagctcgcgtcgtgcaggacgtgacaaatggaagtagcacgtctcactagtctcgtgcagatggacagcaccgctgagcaatggaagcgggtaggcctttggggcagcggccaatagcagctttgctccttcgctttctgggctcagaggctgggaaggggtgggtccgggggcgggctcaggggcgggctcaggggcggggcgggcgcccgaaggtcctccggaggcccggcattctgcacgcttcaaaagcgcacgtctgccgcgctgttctcctcttcctcatctccgggcctttcgacctgcagcccaaggccaccatggccttaccagtgaccgccttgctcctgccgctggccttgctgctccacgccgccaggccggagcagaagctgatcagcgaggaggacctggacatccagatgacacagactacatcctccctgtctgcctctctgggagacagagtcaccatcagttgcagggcaagtcaggacattagtaaatatttaaattggtatcagcagaaaccagatggaactgttaaactcctgatctaccatacatcaagattacactcaggagtcccatcaaggttcagtggcagtgggtctggaacagattattctctcaccattagcaacctggagcaagaagatattgccacttacttttgccaacagggtaatacgcttccgtacacgttcggaggggggaccaagctggagatcacaggtggcggtggctcgggcggtggtgggtcgggtggcggcggatctgaggtgaaactgcaggagtcaggacctggcctggtggcgccctcacagagcctgtccgtcacatgcactgtctcaggggtctcattacccgactatggtgtaagctggattcgccagcctccacgaaagggtctggagtggctgggagtaatatggggtagtgaaaccacatactataattcagctctcaaatccagactgaccatcatcaaggacaactccaagagccaagttttcttaaaaatgaacagtctgcaaactgatgacacagccatttactactgtgccaaacattattactacggtggtagctatgctatggactactggggccaaggaacctcagtcaccgtctcctcaaccacgacgccagcgccgcgaccaccaacaccggcgcccaccatcgcgtcgcagcccctgtccctgcgcccagaggcgtgctttatgtacgtggcagccgcggcatttgtacttctgtttttcgtggggtgcggtgtgcttctcagcaagaggaaacggaagcaccccaagaaaaagaggaaggtgtctagacccggagagcgcccattccagtgtcggatttgcatgcggaacttttcgagaagacacggcctggacagacatacccgtactcatacaggtgaaaaaccctttcagtgtcggatctgtatgcgaaatttctccgaccacagcagcctgaagagacatctacgtacccacaccggcagccagaagccatttcagtgtcggatctgtatgcggaacttctccgtgagacacaacctgaccagacatctacgtacgcacaccggagagaagccattccaatgccgaatatgcatgcgcaacttcagtgaccacagcaacctgagcagacacctaaaaacccacaccggttcccagaagccatttcagtgtcggatctgtatgcggaacttctcccagcgcagcagcctggtgagacatctacgtacgcacaccggagagaagccattccaatgccgaatatgcatgcgcaacttcagtgagagcggccacctgaagagacacctgcgtacgcacctgagggatgagtttcccaccatggtgtttccttctgggcagatcagccaggcctcggccttggccccggcccctccccaagtcctgccccaggctccagcccctgcccctgctccagccatggtatcagctctggcccaggccccagcccctgtcccagtcctagccccaggccctcctcaggctgtggccccacctgcccccaagcccacccaggctggggaaggaacgctgtcagaggccctgctgcagctgcagtttgatgatgaagacctgggggccttgcttggcaacagcacagacccagctgtgttcacagacctggcatccgtcgacaactccgagtttcagcagctgctgaaccagggcatacctgtggccccccacacaactgagcccatgctgatggagtaccctgaggctataactcgcctagtgacaggggcccagaggccccccgacccagctcctgctccactgggggccccggggctccccaatggcctcctttcaggagatgaagacttctcctccattgcggacatggacttctcagccctgctgagtcagatcagctcctaagcggccgctaatcaacctctggattacaaaatttgtgaaagattgactggtattcttaactatgttgctccttttacgctatgtggatacgctgctttaatgcctttgtatcatgctattgcttcccgtatggctttcattttctcctccttgtataaatcctggttgctgtctctttatgaggagttgtggcccgttgtcaggcaacgtggcgtggtgtgcactgtgtttgctgacgcaacccccactggttggggcattgccaccacctgtcagctcctttccgggactttcgctttccccctccctattgccacggcggaactcatcgccgcctgccttgcccgctgctggacaggggctcggctgttgggcactgacaattccgtggtgttgtcggggaaatcatcgtcctttccttggctgctcgcctgtgttgccacctggattctgcgcgggacgtccttctgctacgtcccttcggccctcaatccagcggaccttccttcccgcggcctgctgccggctctgcggcctcttccgcgtcttcgccttcgccctcagacgagtcggatctccctttgggccgcctccccgcatgcgatcgcttagccactttttaaaagaaaaggggggactggaagggctaattcactcccaacgaagacaagatctgctttttgcttgtactgggtctctctggttagaccagatctgagcctgggagctctctggctaactagggaacccactgcttaagcctcaataaagcttgccttgagtgcttcaagtagtgtgtgcccgtctgttgtgtgactctggtaactagagatccctcagacccttttagtcagtgtggaaaatctctagcagcatctagaattaattccgtgtattctatagtgtcacctaaatcgtatgtgtatgatacataaggttatgtattaattgtagccgcgttctaacgacaatatgtacaagcctaattgtgtagcatctggcttactgaagcagaccctatcatctctctcgtaaactgccgtcagagtcggtttggttggacgaaccttctgagtttctggtaacgccgtcccgcacccggaaatggtcagcgaaccaatcagcagggtcatcgctagccagatcctctacgccggacgcatcgtggccggcatcaccggcgccacaggtgcggttgctggcgcctatatcgccgacatcaccgatggggaagatcgggctcgccacttcgggctcatgagcgcttgtttcggcgtgggtatggtggcaggccccgtggccgggggactgttgggcgccatctccttgcatgcaccattccttgcggcggcggtgctcaacggcctcaacctactactgggctgcttcctaatgcaggagtcgcataagggagagcgtcgaatggtgcactctcagtacaatctgctctgatgccgcatagttaagccagccccgacacccgccaacacccgctgacgcgccctgacgggcttgtctgctcccggcatccgcttacagacaagctgtgaccgtctccgggagctgcatgtgtcagaggttttcaccgtcatcaccgaaacgcgcgagacgaaagggcctcgtgatacgcctatttttataggttaatgtcatgataataatggtttcttagacgtcaggtggcacttttcggggaaatgtgcgcggaacccctatttgtttatttttctaaatacattcaaatatgtatccgctcatgagacaataaccctgataaatgcttcaataatattgaaaaaggaagagtatgagtattcaacatttccgtgtcgcccttattcccttttttgcggcattttgccttcctgtttttgctcacccagaaacgctggtgaaagtaaaagatgctgaagatcagttgggtgcacgagtgggttacatcgaactggatctcaacagcggtaagatccttgagagttttcgccccgaagaacgttttccaatgatgagcacttttaaagttctgctatgtggcgcggtattatcccgtattgacgccgggcaagagcaactcggtcgccgcatacactattctcagaatgacttggttgagtactcaccagtcacagaaaagcatcttacggatggcatgacagtaagagaattatgcagtgctgccataaccatgagtgataacactgcggccaacttacttctgacaacgatcggaggaccgaaggagctaaccgcttttttgcacaacatgggggatcatgtaactcgccttgatcgttgggaaccggagctgaatgaagccataccaaacgacgagcgtgacaccacgatgcctgtagcaatggcaacaacgttgcgcaaactattaactggcgaactacttactctagcttcccggcaacaattaatagactggatggaggcggataaagttgcaggaccacttctgcgctcggcccttccggctggctggtttattgctgataaatctggagccggtgagcgtgggtctcgcggtatcattgcagcactggggccagatggtaagccctcccgtatcgtagttatctacacgacggggagtcaggcaactatggatgaacgaaatagacagatcgctgagataggtgcctcactgattaagcattggtaactgtcagaccaagtttactcatatatactttagattgatttaaaacttcatttttaatttaaaaggatctaggtgaagatcctttttgataatctcatgaccaaaatcccttaacgtgagttttcgttccactgagcgtcagaccccgtagaaaagatcaaaggatcttcttgagatcctttttttctgcgcgtaatctgctgcttgcaaacaaaaaaaccaccgctaccagcggtggtttgtttgccggatcaagagctaccaactctttttccgaaggtaactggcttcagcagagcgcagataccaaatactgttcttctagtgtagccgtagttaggccaccacttcaagaactctgtagcaccgcctacatacctcgctctgctaatcctgttaccagtggctgctgccagtggcgataagtcgtgtcttaccgggttggactcaagacgatagttaccggataaggcgcagcggtcgggctgaacggggggttcgtgcacacagcccagcttggagcgaacgacctacaccgaactgagatacctacagcgtgagctatgagaaagcgccacgcttcccgaagggagaaaggcggacaggtatccggtaagcggcagggtcggaacaggagagcgcacgagggagcttccagggggaaacgcctggtatctttatagtcctgtcgggtttcgccacctctgacttgagcgtcgatttttgtgatgctcgtcaggggggcggagcctatggaaaaacgccagcaacgcggcctttttacggttcctggccttttgctggccttttgctcacatgttctttcctgcgttatcccctgattctgtggataaccgtattaccgcctttgagtgagctgataccgctcgccgcagccgaacgaccgagcgcagcgagtcagtgagcgaggaagcggaagagcgcccaatacgcaaaccgcctctccccgcgcgttggccgattcattaatgcagctgtggaatgtgtgtcagttagggtgtggaaagtccccaggctccccagcaggcagaagtatgcaaagcatgcatctcaattagtcagcaaccaggtgtggaaagtccccaggctccccagcaggcagaagtatgcaaagcatgcatctcaattagtcagcaaccatagtcccgcccctaactccgcccatcccgcccctaactccgcccagttccgcccattctccgccccatcgctgactaattttttttatttatgcagaggccgaggccgcctcggcctctgagctattccagaagtagtgaggaggcttttttggaggcctaggcttttgcaaaaagcttggacacaagacaggcttgcgagatatgtttgagaataccactttatcccgcgtcagggagaggcagtgcgtaaaaagacgcggactcatgtgaaatactggtttttagtgcgccagatctctataatctcgcgcaacctattttcccctcgaacactttttaagccgtagataaacaggctgggacacttcacatgagcgaaaaatacatcgtcacctgggacatgttgcagatccatgcacgtaaactcgcaagccgactgatgccttctgaacaatggaaaggcattattgccgtaagccgtggcggtctgtaccgggtgcgttactggcgcgtgaactgggtattcgtcatgtcgataccgtttgtatttccagctacgatcacgacaaccagcgcgagcttaaagtgctgaaacgcgcagaaggcgatggcgaaggcttcatcgttattgatgacctggtggataccggtggtactgcggttgcgattcgtgaaatgtatccaaaagcgcactttgtcaccatcttcgcaaaaccggctggtcgtccgctggttgatgactatgttgttgatatcccgcaagatacctggattgaacagccgtgggatatgggcgtcgtattcgtcccgccaatctccggtcgctaatcttttcaacgcctggcactgccgggcgttgttctttttaacttcaggcgggttacaatagtttccagtaagtattctggaggctgcatccatgacacaggcaaacctgagcgaaaccctgttcaaaccccgctttaaacatcctgaaacctcgacgctagtccgccgctttaatcacggcgcacaaccgcctgtgcagtcggcccttgatggtaaaaccatccctcactggtatcgcatgattaaccgtctgatgtggatctggcgcggcattgacccacgcgaaatcctcgacgtccaggcacgtattgtgatgagcgatgccgaacgtaccgacgatgatttatacgatacggtgattggctaccgtggcggcaactggatttatgagtgggccccggatctttgtgaaggaaccttacttctgtggtgtgacataattggacaaactacctacagagatttaaagctctaaggtaaatataaaatttttaagtgtataatgtgttaaactactgattctaattgtttgtgtattttagattccaacctatggaactgatgaatgggagcagtggtggaatgcctttaatgaggaaaacctgttttgctcagaagaaatgccatctagtgatgatgaggctactgctgactctcaacattctactcctccaaaaaagaagagaaaggtagaagaccccaaggactttccttcagaattgctaagttttttgagtcatgctgtgtttagtaatagaactcttgcttgctttgctatttacaccacaaaggaaaaagctgcactgctatacaagaaaattatggaaaaatattctgtaacctttataagtaggcataacagttataatcataacatactgttttttcttactccacacaggcatagagtgtctgctattaataactatgctcaaaaattgtgtacctttagctttttaatttgtaaaggggttaataaggaatatttgatgtatagtgccttgactagagatcataatcagccataccacatttgtagaggttttacttgctttaaaaaacctcccacacctccccctgaacctgaaacataaaatgaatgcaattgttgttgttaacttgtttattgcagcttataatggttacaaataaagcaatagcatcacaaatttcacaaataaagcatttttttcactgcattctagttgtggtttgtccaaactcatcaatgtatcttatcatgtctggatcaactggataactcaagctaaccaaaatcatcccaaacttcccaccccataccctattaccactgccaattacctagtggtttcatttactctaaacctgtgattcctctgaattattttcattttaaagaaattgtatttgttaaatatgtactacaaacttagtagt

SEQ ID NO: 171 - DNA, 10506 bp, Artificial sequence
  Synthetic construct
tggaagggctaattcactcccaaagaagacaagatatccttgatctgtggatctaccacacacaaggctacttccctgattagcagaactacacaccagggccaggggtcagatatccactgacctttggatggtgctacaagctagtaccagttgagccagataaggtagaagaggccaataaaggagagaacaccagcttgttacaccctgtgagcctgcatgggatggatgacccggagagagaagtgttagagtggaggtttgacagccgcctagcatttcatcacgtggcccgagagctgcatccggagtacttcaagaactgctgatatcgagcttgctacaagggactttccgctggggactttccagggaggcgtggcctgggcgggactggggagtggcgagccctcagatcctgcatataagcagctgctttttgcctgtactgggtctctctggttagaccagatctgagcctgggagctctctggctaactagggaacccactgcttaagcctcaataaagcttgccttgagtgcttcaagtagtgtgtgcccgtctgttgtgtgactctggtaactagagatccctcagacccttttagtcagtgtggaaaatctctagcagtggcgcccgaacagggacttgaaagcgaaagggaaaccagaggagctctctcgacgcaggactcggcttgctgaagcgcgcacggcaagaggcgaggggcggcgactggtgagtacgccaaaaattttgactagcggaggctagaaggagagagatgggtgcgagagcgtcagtattaagcgggggagaattagatcgcgatgggaaaaaattcggttaaggccagggggaaagaaaaaatataaattaaaacatatagtatgggcaagcagggagctagaacgattcgcagttaatcctggcctgttagaaacatcagaaggctgtagacaaatactgggacagctacaaccatcccttcagacaggatcagaagaacttagatcattatataatacagtagcaaccctctattgtgtgcatcaaaggatagagataaaagacaccaaggaagctttagacaagatagaggaagagcaaaacaaaagtaagaccaccgcacagcaagcggccggtgatcttcagacctggacgatatatatgagggacaattggagaagtgaattatataaatataaagtagtaaaaattgaaccattaggagtagcacccaccaaggcaaagagaagagtggtgcagagagaaaaaagagcagtgggaataggagctttgttccttgggttcttgggagcagcaggaagcactatgggcgcagcgtcaatgacgctgacggtacaggccagacaattattgtctggtatagtgcagcagcagaacaatttgctgagggctattgaggcgcaacagcatctgttgcaactcacagtctggggcatcaagcagctccaggcaagaatcctggctgtggaaagatacctaaaggatcaacagctcctggggatttggggttgctctggaaaactcatttgcaccactgctgtgccttggaatgctagttggagtaataaatctctggaacagatttggaatcacacgacctggatggagtgggacagagaaattaacaattacacaagcttaatacactccttaattgaagaatcgcaaaaccagcaagaaaagaatgaacaagaattattggaattagataaatgggcaagtttgtggaattggtttaacataacaaattggctgtggtatataaaattattcataatgatagtaggaggcttggtaggtttaagaatagtttttgctgtactttctatagtgaatagagttaggcagggatattcaccattatcgtttcagacccacctcccaaccccgaggggacccgacaggcccgaaggaatagaagaagaaggtggagagagagacagagacagatccattcgattagtgaacggatctcgacggtatcgccaaatggcagtattcatccacaattttaaaagaaaaggggggattggggggtacagtgcaggggaaagaatagtagacataatagcaacagacatacaaactaaagaattacaaaaacaaattacaaaaattcaaaattttcgggtttattacagggacagcagagatccagtttggatcgataagcttgatatcgaattcgggtaggggaggcgcttttcccaaggcagtctggagcatgcgctttagcagccccgctgggcacttggcgctacacaagtggcctctggcctcgcacacattccacatccaccggtaggcgccaaccggctccgttctttggtggccccttcgcgccaccttctactcctcccctagtcaggaagttcccccccgccccgcagctcgcgtcgtgcaggacgtgacaaatggaagtagcacgtctcactagtctcgtgcagatggacagcaccgctgagcaatggaagcgggtaggcctttggggcagcggccaatagcagctttgctccttcgctttctgggctcagaggctgggaaggggtgggtccgggggcgggctcaggggcgggctcaggggcggggcgggcgcccgaaggtcctccggaggcccggcattctgcacgcttcaaaagcgcacgtctgccgcgctgttctcctcttcctcatctccgggcctttcgacctgcagcccaaggccaccatggccttaccagtgaccgccttgctcctgccgctggccttgctgctccacgccgccaggccggagcagaagctgatcagcgaggaggacctggacatccagatgacacagactacatcctccctgtctgcctctctgggagacagagtcaccatcagttgcagggcaagtcaggacattagtaaatatttaaattggtatcagcagaaaccagatggaactgttaaactcctgatctaccatacatcaagattacactcaggagtcccatcaaggttcagtggcagtgggtctggaacagattattctctcaccattagcaacctggagcaagaagatattgccacttacttttgccaacagggtaatacgcttccgtacacgttcggaggggggaccaagctggagatcacaggtggcggtggctcgggcggtggtgggtcgggtggcggcggatctgaggtgaaactgcaggagtcaggacctggcctggtggcgccctcacagagcctgtccgtcacatgcactgtctcaggggtctcattacccgactatggtgtaagctggattcgccagcctccacgaaagggtctggagtggctgggagtaatatggggtagtgaaaccacatactataattcagctctcaaatccagactgaccatcatcaaggacaactccaagagccaagttttcttaaaaatgaacagtctgcaaactgatgacacagccatttactactgtgccaaacattattactacggtggtagctatgctatggactactggggccaaggaacctcagtcaccgtctcctcaaccacgacgccagcgccgcgaccaccaacaccggcgcccaccatcgcgtcgcagcccctgtccctgcgcccagaggcgtgctttatgtacgtggcagccgcggcatttgtacttctgtttttcgtggggtgcggtgtgcttctcagcaagaggaaacggaagcaccccaagaaaaagaggaaggtgtctagacccggagagcgcccattccagtgtcggatttgcatgcggaacttttcgagaagacacggcctggacagacatacccgtactcatacaggtgaaaaaccctttcagtgtcggatctgtatgcgaaatttctccgaccacagcagcctgaagagacatctacgtacccacaccggcagccagaagccatttcagtgtcggatctgtatgcggaacttctccgtgagacacaacctgaccagacatctacgtacgcacaccggagagaagccattccaatgccgaatatgcatgcgcaacttcagtgaccacagcaacctgagcagacacctaaaaacccacaccggttcccagaagccatttcagtgtcggatctgtatgcggaacttctcccagcgcagcagcctggtgagacatctacgtacgcacaccggagagaagccattccaatgccgaatatgcatgcgcaacttcagtgagagcggccacctgaagagacacctgcgtacgcacctgagggatgccctggacgacttcgacctggatatgctgggcagcgacgccctggatgattttgatctggacatgctgggatctgacgctctggacgatttcgatctcgacatgttgggatcagatgcactggatgactttgacctggacatgctcggatcatgagcggccgctaatcaacctctggattacaaaatttgtgaaagattgactggtattcttaactatgttgctccttttacgctatgtggatacgctgctttaatgcctttgtatcatgctattgcttcccgtatggctttcattttctcctccttgtataaatcctggttgctgtctctttatgaggagttgtggcccgttgtcaggcaacgtggcgtggtgtgcactgtgtttgctgacgcaacccccactggttggggcattgccaccacctgtcagctcctttccgggactttcgctttccccctccctattgccacggcggaactcatcgccgcctgccttgcccgctgctggacaggggctcggctgttgggcactgacaattccgtggtgttgtcggggaaatcatcgtcctttccttggctgctcgcctgtgttgccacctggattctgcgcgggacgtccttctgctacgtcccttcggccctcaatccagcggaccttccttcccgcggcctgctgccggctctgcggcctcttccgcgtcttcgccttcgccctcagacgagtcggatctccctttgggccgcctccccgcatgcgatcgcttagccactttttaaaagaaaaggggggactggaagggctaattcactcccaacgaagacaagatctgctttttgcttgtactgggtctctctggttagaccagatctgagcctgggagctctctggctaactagggaacccactgcttaagcctcaataaagcttgccttgagtgcttcaagtagtgtgtgcccgtctgttgtgtgactctggtaactagagatccctcagacccttttagtcagtgtggaaaatctctagcagcatctagaattaattccgtgtattctatagtgtcacctaaatcgtatgtgtatgatacataaggttatgtattaattgtagccgcgttctaacgacaatatgtacaagcctaattgtgtagcatctggcttactgaagcagaccctatcatctctctcgtaaactgccgtcagagtcggtttggttggacgaaccttctgagtttctggtaacgccgtcccgcacccggaaatggtcagcgaaccaatcagcagggtcatcgctagccagatcctctacgccggacgcatcgtggccggcatcaccggcgccacaggtgcggttgctggcgcctatatcgccgacatcaccgatggggaagatcgggctcgccacttcgggctcatgagcgcttgtttcggcgtgggtatggtggcaggccccgtggccgggggactgttgggcgccatctccttgcatgcaccattccttgcggcggcggtgctcaacggcctcaacctactactgggctgcttcctaatgcaggagtcgcataagggagagcgtcgaatggtgcactctcagtacaatctgctctgatgccgcatagttaagccagccccgacacccgccaacacccgctgacgcgccctgacgggcttgtctgctcccggcatccgcttacagacaagctgtgaccgtctccgggagctgcatgtgtcagaggttttcaccgtcatcaccgaaacgcgcgagacgaaagggcctcgtgatacgcctatttttataggttaatgtcatgataataatggtttcttagacgtcaggtggcacttttcggggaaatgtgcgcggaacccctatttgtttatttttctaaatacattcaaatatgtatccgctcatgagacaataaccctgataaatgcttcaataatattgaaaaaggaagagtatgagtattcaacatttccgtgtcgcccttattcccttttttgcggcattttgccttcctgtttttgctcacccagaaacgctggtgaaagtaaaagatgctgaagatcagttgggtgcacgagtgggttacatcgaactggatctcaacagcggtaagatccttgagagttttcgccccgaagaacgttttccaatgatgagcacttttaaagttctgctatgtggcgcggtattatcccgtattgacgccgggcaagagcaactcggtcgccgcatacactattctcagaatgacttggttgagtactcaccagtcacagaaaagcatcttacggatggcatgacagtaagagaattatgcagtgctgccataaccatgagtgataacactgcggccaacttacttctgacaacgatcggaggaccgaaggagctaaccgcttttttgcacaacatgggggatcatgtaactcgccttgatcgttgggaaccggagctgaatgaagccataccaaacgacgagcgtgacaccacgatgcctgtagcaatggcaacaacgttgcgcaaactattaactggcgaactacttactctagcttcccggcaacaattaatagactggatggaggcggataaagttgcaggaccacttctgcgctcggcccttccggctggctggtttattgctgataaatctggagccggtgagcgtgggtctcgcggtatcattgcagcactggggccagatggtaagccctcccgtatcgtagttatctacacgacggggagtcaggcaactatggatgaacgaaatagacagatcgctgagataggtgcctcactgattaagcattggtaactgtcagaccaagtttactcatatatactttagattgatttaaaacttcatttttaatttaaaaggatctaggtgaagatcctttttgataatctcatgaccaaaatcccttaacgtgagttttcgttccactgagcgtcagaccccgtagaaaagatcaaaggatcttcttgagatcctttttttctgcgcgtaatctgctgcttgcaaacaaaaaaaccaccgctaccagcggtggtttgtttgccggatcaagagctaccaactctttttccgaaggtaactggcttcagcagagcgcagataccaaatactgttcttctagtgtagccgtagttaggccaccacttcaagaactctgtagcaccgcctacatacctcgctctgctaatcctgttaccagtggctgctgccagtggcgataagtcgtgtcttaccgggttggactcaagacgatagttaccggataaggcgcagcggtcgggctgaacggggggttcgtgcacacagcccagcttggagcgaacgacctacaccgaactgagatacctacagcgtgagctatgagaaagcgccacgcttcccgaagggagaaaggcggacaggtatccggtaagcggcagggtcggaacaggagagcgcacgagggagcttccagggggaaacgcctggtatctttatagtcctgtcgggtttcgccacctctgacttgagcgtcgatttttgtgatgctcgtcaggggggcggagcctatggaaaaacgccagcaacgcggcctttttacggttcctggccttttgctggccttttgctcacatgttctttcctgcgttatcccctgattctgtggataaccgtattaccgcctttgagtgagctgataccgctcgccgcagccgaacgaccgagcgcagcgagtcagtgagcgaggaagcggaagagcgcccaatacgcaaaccgcctctccccgcgcgttggccgattcattaatgcagctgtggaatgtgtgtcagttagggtgtggaaagtccccaggctccccagcaggcagaagtatgcaaagcatgcatctcaattagtcagcaaccaggtgtggaaagtccccaggctccccagcaggcagaagtatgcaaagcatgcatctcaattagtcagcaaccatagtcccgcccctaactccgcccatcccgcccctaactccgcccagttccgcccattctccgccccatcgctgactaattttttttatttatgcagaggccgaggccgcctcggcctctgagctattccagaagtagtgaggaggcttttttggaggcctaggcttttgcaaaaagcttggacacaagacaggcttgcgagatatgtttgagaataccactttatcccgcgtcagggagaggcagtgcgtaaaaagacgcggactcatgtgaaatactggtttttagtgcgccagatctctataatctcgcgcaacctattttcccctcgaacactttttaagccgtagataaacaggctgggacacttcacatgagcgaaaaatacatcgtcacctgggacatgttgcagatccatgcacgtaaactcgcaagccgactgatgccttctgaacaatggaaaggcattattgccgtaagccgtggcggtctgtaccgggtgcgttactggcgcgtgaactgggtattcgtcatgtcgataccgtttgtatttccagctacgatcacgacaaccagcgcgagcttaaagtgctgaaacgcgcagaaggcgatggcgaaggcttcatcgttattgatgacctggtggataccggtggtactgcggttgcgattcgtgaaatgtatccaaaagcgcactttgtcaccatcttcgcaaaaccggctggtcgtccgctggttgatgactatgttgttgatatcccgcaagatacctggattgaacagccgtgggatatgggcgtcgtattcgtcccgccaatctccggtcgctaatcttttcaacgcctggcactgccgggcgttgttctttttaacttcaggcgggttacaatagtttccagtaagtattctggaggctgcatccatgacacaggcaaacctgagcgaaaccctgttcaaaccccgctttaaacatcctgaaacctcgacgctagtccgccgctttaatcacggcgcacaaccgcctgtgcagtcggcccttgatggtaaaaccatccctcactggtatcgcatgattaaccgtctgatgtggatctggcgcggcattgacccacgcgaaatcctcgacgtccaggcacgtattgtgatgagcgatgccgaacgtaccgacgatgatttatacgatacggtgattggctaccgtggcggcaactggatttatgagtgggccccggatctttgtgaaggaaccttacttctgtggtgtgacataattggacaaactacctacagagatttaaagctctaaggtaaatataaaatttttaagtgtataatgtgttaaactactgattctaattgtttgtgtattttagattccaacctatggaactgatgaatgggagcagtggtggaatgcctttaatgaggaaaacctgttttgctcagaagaaatgccatctagtgatgatgaggctactgctgactctcaacattctactcctccaaaaaagaagagaaaggtagaagaccccaaggactttccttcagaattgctaagttttttgagtcatgctgtgtttagtaatagaactcttgcttgctttgctatttacaccacaaaggaaaaagctgcactgctatacaagaaaattatggaaaaatattctgtaacctttataagtaggcataacagttataatcataacatactgttttttcttactccacacaggcatagagtgtctgctattaataactatgctcaaaaattgtgtacctttagctttttaatttgtaaaggggttaataaggaatatttgatgtatagtgccttgactagagatcataatcagccataccacatttgtagaggttttacttgctttaaaaaacctcccacacctccccctgaacctgaaacataaaatgaatgcaattgttgttgttaacttgtttattgcagcttataatggttacaaataaagcaatagcatcacaaatttcacaaataaagcatttttttcactgcattctagttgtggtttgtccaaactcatcaatgtatcttatcatgtctggatcaactggataactcaagctaaccaaaatcatcccaaacttcccaccccataccctattaccactgccaattacctagtggtttcatttactctaaacctgtgattcctctgaattattttcattttaaagaaattgtatttgttaaatatgtactacaaacttagtagt

SEQ ID NO: 172 - DNA, 10857 bp, Artificial sequence
  Synthetic construct
tggaagggctaattcactcccaaagaagacaagatatccttgatctgtggatctaccacacacaaggctacttccctgattagcagaactacacaccagggccaggggtcagatatccactgacctttggatggtgctacaagctagtaccagttgagccagataaggtagaagaggccaataaaggagagaacaccagcttgttacaccctgtgagcctgcatgggatggatgacccggagagagaagtgttagagtggaggtttgacagccgcctagcatttcatcacgtggcccgagagctgcatccggagtacttcaagaactgctgatatcgagcttgctacaagggactttccgctggggactttccagggaggcgtggcctgggcgggactggggagtggcgagccctcagatcctgcatataagcagctgctttttgcctgtactgggtctctctggttagaccagatctgagcctgggagctctctggctaactagggaacccactgcttaagcctcaataaagcttgccttgagtgcttcaagtagtgtgtgcccgtctgttgtgtgactctggtaactagagatccctcagacccttttagtcagtgtggaaaatctctagcagtggcgcccgaacagggacttgaaagcgaaagggaaaccagaggagctctctcgacgcaggactcggcttgctgaagcgcgcacggcaagaggcgaggggcggcgactggtgagtacgccaaaaattttgactagcggaggctagaaggagagagatgggtgcgagagcgtcagtattaagcgggggagaattagatcgcgatgggaaaaaattcggttaaggccagggggaaagaaaaaatataaattaaaacatatagtatgggcaagcagggagctagaacgattcgcagttaatcctggcctgttagaaacatcagaaggctgtagacaaatactgggacagctacaaccatcccttcagacaggatcagaagaacttagatcattatataatacagtagcaaccctctattgtgtgcatcaaaggatagagataaaagacaccaaggaagctttagacaagatagaggaagagcaaaacaaaagtaagaccaccgcacagcaagcggccggtgatcttcagacctggacgatatatatgagggacaattggagaagtgaattatataaatataaagtagtaaaaattgaaccattaggagtagcacccaccaaggcaaagagaagagtggtgcagagagaaaaaagagcagtgggaataggagctttgttccttgggttcttgggagcagcaggaagcactatgggcgcagcgtcaatgacgctgacggtacaggccagacaattattgtctggtatagtgcagcagcagaacaatttgctgagggctattgaggcgcaacagcatctgttgcaactcacagtctggggcatcaagcagctccaggcaagaatcctggctgtggaaagatacctaaaggatcaacagctcctggggatttggggttgctctggaaaactcatttgcaccactgctgtgccttggaatgctagttggagtaataaatctctggaacagatttggaatcacacgacctggatggagtgggacagagaaattaacaattacacaagcttaatacactccttaattgaagaatcgcaaaaccagcaagaaaagaatgaacaagaattattggaattagataaatgggcaagtttgtggaattggtttaacataacaaattggctgtggtatataaaattattcataatgatagtaggaggcttggtaggtttaagaatagtttttgctgtactttctatagtgaatagagttaggcagggatattcaccattatcgtttcagacccacctcccaaccccgaggggacccgacaggcccgaaggaatagaagaagaaggtggagagagagacagagacagatccattcgattagtgaacggatctcgacggtatcgccaaatggcagtattcatccacaattttaaaagaaaaggggggattggggggtacagtgcaggggaaagaatagtagacataatagcaacagacatacaaactaaagaattacaaaaacaaattacaaaaattcaaaattttcgggtttattacagggacagcagagatccagtttggatcgataagcttgatatcgaattcgggtaggggaggcgcttttcccaaggcagtctggagcatgcgctttagcagccccgctgggcacttggcgctacacaagtggcctctggcctcgcacacattccacatccaccggtaggcgccaaccggctccgttctttggtggccccttcgcgccaccttctactcctcccctagtcaggaagttcccccccgccccgcagctcgcgtcgtgcaggacgtgacaaatggaagtagcacgtctcactagtctcgtgcagatggacagcaccgctgagcaatggaagcgggtaggcctttggggcagcggccaatagcagctttgctccttcgctttctgggctcagaggctgggaaggggtgggtccgggggcgggctcaggggcgggctcaggggcggggcgggcgcccgaaggtcctccggaggcccggcattctgcacgcttcaaaagcgcacgtctgccgcgctgttctcctcttcctcatctccgggcctttcgacctgcagcccaaggccaccatggccttaccagtgaccgccttgctcctgccgctggccttgctgctccacgccgccaggccggagcagaagctgatcagcgaggaggacctggacatccagatgacacagactacatcctccctgtctgcctctctgggagacagagtcaccatcagttgcagggcaagtcaggacattagtaaatatttaaattggtatcagcagaaaccagatggaactgttaaactcctgatctaccatacatcaagattacactcaggagtcccatcaaggttcagtggcagtgggtctggaacagattattctctcaccattagcaacctggagcaagaagatattgccacttacttttgccaacagggtaatacgcttccgtacacgttcggaggggggaccaagctggagatcacaggtggcggtggctcgggcggtggtgggtcgggtggcggcggatctgaggtgaaactgcaggagtcaggacctggcctggtggcgccctcacagagcctgtccgtcacatgcactgtctcaggggtctcattacccgactatggtgtaagctggattcgccagcctccacgaaagggtctggagtggctgggagtaatatggggtagtgaaaccacatactataattcagctctcaaatccagactgaccatcatcaaggacaactccaagagccaagttttcttaaaaatgaacagtctgcaaactgatgacacagccatttactactgtgccaaacattattactacggtggtagctatgctatggactactggggccaaggaacctcagtcaccgtctcctcaaccacgacgccagcgccgcgaccaccaacaccggcgcccaccatcgcgtcgcagcccctgtccctgcgcccagaggcgtgctttatgtacgtggcagccgcggcatttgtacttctgtttttcgtggggtgcggtgtgcttctcagcaagaggaaacggaagcacatgaagctgctgagcagcatcgagcaggcctgtgacatctgccggctgaagaaactgaagtgcagcaaagaaaagcccaagtgcgccaagtgcctgaagaacaactgggagtgccggtacagccccaagaccaagagaagccccctgaccagagcccacctgaccgaggtggaaagccggctggaaagactggaacagctgtttctgctgatcttcccacgcgaggacctggacatgatcctgaagatggacagcctgcaggacatcaaggccctgctgaccggcctgttcgtgcaggacaacgtgaacaaggacgccgtgaccgacagactggccagcgtggaaaccgacatgcccctgaccctgcggcagcacagaatcagcgccaccagcagcagcgaggaaagcagcaacaagggccagcggcagctgacagtgtctgctgctgcaggcggaagcggaggctctggcggatctgatgagtttcccaccatggtgtttccttctgggcagatcagccaggcctcggccttggccccggcccctccccaagtcctgccccaggctccagcccctgcccctgctccagccatggtatcagctctggcccaggccccagcccctgtcccagtcctagccccaggccctcctcaggctgtggccccacctgcccccaagcccacccaggctggggaaggaacgctgtcagaggccctgctgcagctgcagtttgatgatgaagacctgggggccttgcttggcaacagcacagacccagctgtgttcacagacctggcatccgtcgacaactccgagtttcagcagctgctgaaccagggcatacctgtggccccccacacaactgagcccatgctgatggagtaccctgaggctataactcgcctagtgacaggggcccagaggccccccgacccagctcctgctccactgggggccccggggctccccaatggcctcctttcaggagatgaagacttctcctccattgcggacatggacttctcagccctgctgagtcagatcagctcctaagcggccgctaatcaacctctggattacaaaatttgtgaaagattgactggtattcttaactatgttgctccttttacgctatgtggatacgctgctttaatgcctttgtatcatgctattgcttcccgtatggctttcattttctcctccttgtataaatcctggttgctgtctctttatgaggagttgtggcccgttgtcaggcaacgtggcgtggtgtgcactgtgtttgctgacgcaacccccactggttggggcattgccaccacctgtcagctcctttccgggactttcgctttccccctccctattgccacggcggaactcatcgccgcctgccttgcccgctgctggacaggggctcggctgttgggcactgacaattccgtggtgttgtcggggaaatcatcgtcctttccttggctgctcgcctgtgttgccacctggattctgcgcgggacgtccttctgctacgtcccttcggccctcaatccagcggaccttccttcccgcggcctgctgccggctctgcggcctcttccgcgtcttcgccttcgccctcagacgagtcggatctccctttgggccgcctccccgcatgcgatcgcttagccactttttaaaagaaaaggggggactggaagggctaattcactcccaacgaagacaagatctgctttttgcttgtactgggtctctctggttagaccagatctgagcctgggagctctctggctaactagggaacccactgcttaagcctcaataaagcttgccttgagtgcttcaagtagtgtgtgcccgtctgttgtgtgactctggtaactagagatccctcagacccttttagtcagtgtggaaaatctctagcagcatctagaattaattccgtgtattctatagtgtcacctaaatcgtatgtgtatgatacataaggttatgtattaattgtagccgcgttctaacgacaatatgtacaagcctaattgtgtagcatctggcttactgaagcagaccctatcatctctctcgtaaactgccgtcagagtcggtttggttggacgaaccttctgagtttctggtaacgccgtcccgcacccggaaatggtcagcgaaccaatcagcagggtcatcgctagccagatcctctacgccggacgcatcgtggccggcatcaccggcgccacaggtgcggttgctggcgcctatatcgccgacatcaccgatggggaagatcgggctcgccacttcgggctcatgagcgcttgtttcggcgtgggtatggtggcaggccccgtggccgggggactgttgggcgccatctccttgcatgcaccattccttgcggcggcggtgctcaacggcctcaacctactactgggctgcttcctaatgcaggagtcgcataagggagagcgtcgaatggtgcactctcagtacaatctgctctgatgccgcatagttaagccagccccgacacccgccaacacccgctgacgcgccctgacgggcttgtctgctcccggcatccgcttacagacaagctgtgaccgtctccgggagctgcatgtgtcagaggttttcaccgtcatcaccgaaacgcgcgagacgaaagggcctcgtgatacgcctatttttataggttaatgtcatgataataatggtttcttagacgtcaggtggcacttttcggggaaatgtgcgcggaacccctatttgtttatttttctaaatacattcaaatatgtatccgctcatgagacaataaccctgataaatgcttcaataatattgaaaaaggaagagtatgagtattcaacatttccgtgtcgcccttattcccttttttgcggcattttgccttcctgtttttgctcacccagaaacgctggtgaaagtaaaagatgctgaagatcagttgggtgcacgagtgggttacatcgaactggatctcaacagcggtaagatccttgagagttttcgccccgaagaacgttttccaatgatgagcacttttaaagttctgctatgtggcgcggtattatcccgtattgacgccgggcaagagcaactcggtcgccgcatacactattctcagaatgacttggttgagtactcaccagtcacagaaaagcatcttacggatggcatgacagtaagagaattatgcagtgctgccataaccatgagtgataacactgcggccaacttacttctgacaacgatcggaggaccgaaggagctaaccgcttttttgcacaacatgggggatcatgtaactcgccttgatcgttgggaaccggagctgaatgaagccataccaaacgacgagcgtgacaccacgatgcctgtagcaatggcaacaacgttgcgcaaactattaactggcgaactacttactctagcttcccggcaacaattaatagactggatggaggcggataaagttgcaggaccacttctgcgctcggcccttccggctggctggtttattgctgataaatctggagccggtgagcgtgggtctcgcggtatcattgcagcactggggccagatggtaagccctcccgtatcgtagttatctacacgacggggagtcaggcaactatggatgaacgaaatagacagatcgctgagataggtgcctcactgattaagcattggtaactgtcagaccaagtttactcatatatactttagattgatttaaaacttcatttttaatttaaaaggatctaggtgaagatcctttttgataatctcatgaccaaaatcccttaacgtgagttttcgttccactgagcgtcagaccccgtagaaaagatcaaaggatcttcttgagatcctttttttctgcgcgtaatctgctgcttgcaaacaaaaaaaccaccgctaccagcggtggtttgtttgccggatcaagagctaccaactctttttccgaaggtaactggcttcagcagagcgcagataccaaatactgttcttctagtgtagccgtagttaggccaccacttcaagaactctgtagcaccgcctacatacctcgctctgctaatcctgttaccagtggctgctgccagtggcgataagtcgtgtcttaccgggttggactcaagacgatagttaccggataaggcgcagcggtcgggctgaacggggggttcgtgcacacagcccagcttggagcgaacgacctacaccgaactgagatacctacagcgtgagctatgagaaagcgccacgcttcccgaagggagaaaggcggacaggtatccggtaagcggcagggtcggaacaggagagcgcacgagggagcttccagggggaaacgcctggtatctttatagtcctgtcgggtttcgccacctctgacttgagcgtcgatttttgtgatgctcgtcaggggggcggagcctatggaaaaacgccagcaacgcggcctttttacggttcctggccttttgctggccttttgctcacatgttctttcctgcgttatcccctgattctgtggataaccgtattaccgcctttgagtgagctgataccgctcgccgcagccgaacgaccgagcgcagcgagtcagtgagcgaggaagcggaagagcgcccaatacgcaaaccgcctctccccgcgcgttggccgattcattaatgcagctgtggaatgtgtgtcagttagggtgtggaaagtccccaggctccccagcaggcagaagtatgcaaagcatgcatctcaattagtcagcaaccaggtgtggaaagtccccaggctccccagcaggcagaagtatgcaaagcatgcatctcaattagtcagcaaccatagtcccgcccctaactccgcccatcccgcccctaactccgcccagttccgcccattctccgccccatcgctgactaattttttttatttatgcagaggccgaggccgcctcggcctctgagctattccagaagtagtgaggaggcttttttggaggcctaggcttttgcaaaaagcttggacacaagacaggcttgcgagatatgtttgagaataccactttatcccgcgtcagggagaggcagtgcgtaaaaagacgcggactcatgtgaaatactggtttttagtgcgccagatctctataatctcgcgcaacctattttcccctcgaacactttttaagccgtagataaacaggctgggacacttcacatgagcgaaaaatacatcgtcacctgggacatgttgcagatccatgcacgtaaactcgcaagccgactgatgccttctgaacaatggaaaggcattattgccgtaagccgtggcggtctgtaccgggtgcgttactggcgcgtgaactgggtattcgtcatgtcgataccgtttgtatttccagctacgatcacgacaaccagcgcgagcttaaagtgctgaaacgcgcagaaggcgatggcgaaggcttcatcgttattgatgacctggtggataccggtggtactgcggttgcgattcgtgaaatgtatccaaaagcgcactttgtcaccatcttcgcaaaaccggctggtcgtccgctggttgatgactatgttgttgatatcccgcaagatacctggattgaacagccgtgggatatgggcgtcgtattcgtcccgccaatctccggtcgctaatcttttcaacgcctggcactgccgggcgttgttctttttaacttcaggcgggttacaatagtttccagtaagtattctggaggctgcatccatgacacaggcaaacctgagcgaaaccctgttcaaaccccgctttaaacatcctgaaacctcgacgctagtccgccgctttaatcacggcgcacaaccgcctgtgcagtcggcccttgatggtaaaaccatccctcactggtatcgcatgattaaccgtctgatgtggatctggcgcggcattgacccacgcgaaatcctcgacgtccaggcacgtattgtgatgagcgatgccgaacgtaccgacgatgatttatacgatacggtgattggctaccgtggcggcaactggatttatgagtgggccccggatctttgtgaaggaaccttacttctgtggtgtgacataattggacaaactacctacagagatttaaagctctaaggtaaatataaaatttttaagtgtataatgtgttaaactactgattctaattgtttgtgtattttagattccaacctatggaactgatgaatgggagcagtggtggaatgcctttaatgaggaaaacctgttttgctcagaagaaatgccatctagtgatgatgaggctactgctgactctcaacattctactcctccaaaaaagaagagaaaggtagaagaccccaaggactttccttcagaattgctaagttttttgagtcatgctgtgtttagtaatagaactcttgcttgctttgctatttacaccacaaaggaaaaagctgcactgctatacaagaaaattatggaaaaatattctgtaacctttataagtaggcataacagttataatcataacatactgttttttcttactccacacaggcatagagtgtctgctattaataactatgctcaaaaattgtgtacctttagctttttaatttgtaaaggggttaataaggaatatttgatgtatagtgccttgactagagatcataatcagccataccacatttgtagaggttttacttgctttaaaaaacctcccacacctccccctgaacctgaaacataaaatgaatgcaattgttgttgttaacttgtttattgcagcttataatggttacaaataaagcaatagcatcacaaatttcacaaataaagcatttttttcactgcattctagttgtggtttgtccaaactcatcaatgtatcttatcatgtctggatcaactggataactcaagctaaccaaaatcatcccaaacttcccaccccataccctattaccactgccaattacctagtggtttcatttactctaaacctgtgattcctctgaattattttcattttaaagaaattgtatttgttaaatatgtactacaaacttagtagt

SEQ ID NO: 173 - DNA, 10440 bp, Artificial sequence
  Synthetic construct
tggaagggctaattcactcccaaagaagacaagatatccttgatctgtggatctaccacacacaaggctacttccctgattagcagaactacacaccagggccaggggtcagatatccactgacctttggatggtgctacaagctagtaccagttgagccagataaggtagaagaggccaataaaggagagaacaccagcttgttacaccctgtgagcctgcatgggatggatgacccggagagagaagtgttagagtggaggtttgacagccgcctagcatttcatcacgtggcccgagagctgcatccggagtacttcaagaactgctgatatcgagcttgctacaagggactttccgctggggactttccagggaggcgtggcctgggcgggactggggagtggcgagccctcagatcctgcatataagcagctgctttttgcctgtactgggtctctctggttagaccagatctgagcctgggagctctctggctaactagggaacccactgcttaagcctcaataaagcttgccttgagtgcttcaagtagtgtgtgcccgtctgttgtgtgactctggtaactagagatccctcagacccttttagtcagtgtggaaaatctctagcagtggcgcccgaacagggacttgaaagcgaaagggaaaccagaggagctctctcgacgcaggactcggcttgctgaagcgcgcacggcaagaggcgaggggcggcgactggtgagtacgccaaaaattttgactagcggaggctagaaggagagagatgggtgcgagagcgtcagtattaagcgggggagaattagatcgcgatgggaaaaaattcggttaaggccagggggaaagaaaaaatataaattaaaacatatagtatgggcaagcagggagctagaacgattcgcagttaatcctggcctgttagaaacatcagaaggctgtagacaaatactgggacagctacaaccatcccttcagacaggatcagaagaacttagatcattatataatacagtagcaaccctctattgtgtgcatcaaaggatagagataaaagacaccaaggaagctttagacaagatagaggaagagcaaaacaaaagtaagaccaccgcacagcaagcggccggtgatcttcagacctggacgatatatatgagggacaattggagaagtgaattatataaatataaagtagtaaaaattgaaccattaggagtagcacccaccaaggcaaagagaagagtggtgcagagagaaaaaagagcagtgggaataggagctttgttccttgggttcttgggagcagcaggaagcactatgggcgcagcgtcaatgacgctgacggtacaggccagacaattattgtctggtatagtgcagcagcagaacaatttgctgagggctattgaggcgcaacagcatctgttgcaactcacagtctggggcatcaagcagctccaggcaagaatcctggctgtggaaagatacctaaaggatcaacagctcctggggatttggggttgctctggaaaactcatttgcaccactgctgtgccttggaatgctagttggagtaataaatctctggaacagatttggaatcacacgacctggatggagtgggacagagaaattaacaattacacaagcttaatacactccttaattgaagaatcgcaaaaccagcaagaaaagaatgaacaagaattattggaattagataaatgggcaagtttgtggaattggtttaacataacaaattggctgtggtatataaaattattcataatgatagtaggaggcttggtaggtttaagaatagtttttgctgtactttctatagtgaatagagttaggcagggatattcaccattatcgtttcagacccacctcccaaccccgaggggacccgacaggcccgaaggaatagaagaagaaggtggagagagagacagagacagatccattcgattagtgaacggatctcgacggtatcgccaaatggcagtattcatccacaattttaaaagaaaaggggggattggggggtacagtgcaggggaaagaatagtagacataatagcaacagacatacaaactaaagaattacaaaaacaaattacaaaaattcaaaattttcgggtttattacagggacagcagagatccagtttggatcgataagcttgatatcgaattcgggtaggggaggcgcttttcccaaggcagtctggagcatgcgctttagcagccccgctgggcacttggcgctacacaagtggcctctggcctcgcacacattccacatccaccggtaggcgccaaccggctccgttctttggtggccccttcgcgccaccttctactcctcccctagtcaggaagttcccccccgccccgcagctcgcgtcgtgcaggacgtgacaaatggaagtagcacgtctcactagtctcgtgcagatggacagcaccgctgagcaatggaagcgggtaggcctttggggcagcggccaatagcagctttgctccttcgctttctgggctcagaggctgggaaggggtgggtccgggggcgggctcaggggcgggctcaggggcggggcgggcgcccgaaggtcctccggaggcccggcattctgcacgcttcaaaagcgcacgtctgccgcgctgttctcctcttcctcatctccgggcctttcgacctgcagcccaaggccaccatggccttaccagtgaccgccttgctcctgccgctggccttgctgctccacgccgccaggccggagcagaagctgatcagcgaggaggacctggacatccagatgacacagactacatcctccctgtctgcctctctgggagacagagtcaccatcagttgcagggcaagtcaggacattagtaaatatttaaattggtatcagcagaaaccagatggaactgttaaactcctgatctaccatacatcaagattacactcaggagtcccatcaaggttcagtggcagtgggtctggaacagattattctctcaccattagcaacctggagcaagaagatattgccacttacttttgccaacagggtaatacgcttccgtacacgttcggaggggggaccaagctggagatcacaggtggcggtggctcgggcggtggtgggtcgggtggcggcggatctgaggtgaaactgcaggagtcaggacctggcctggtggcgccctcacagagcctgtccgtcacatgcactgtctcaggggtctcattacccgactatggtgtaagctggattcgccagcctccacgaaagggtctggagtggctgggagtaatatggggtagtgaaaccacatactataattcagctctcaaatccagactgaccatcatcaaggacaactccaagagccaagttttcttaaaaatgaacagtctgcaaactgatgacacagccatttactactgtgccaaacattattactacggtggtagctatgctatggactactggggccaaggaacctcagtcaccgtctcctcaaccacgacgccagcgccgcgaccaccaacaccggcgcccaccatcgcgtcgcagcccctgtccctgcgcccagaggcgtgctttatgtacgtggcagccgcggcatttgtacttctgtttttcgtggggtgcggtgtgcttctcagcaagaggaaacggaagcacatgaagctgctgagcagcatcgagcaggcctgtgacatctgccggctgaagaaactgaagtgcagcaaagaaaagcccaagtgcgccaagtgcctgaagaacaactgggagtgccggtacagccccaagaccaagagaagccccctgaccagagcccacctgaccgaggtggaaagccggctggaaagactggaacagctgtttctgctgatcttcccacgcgaggacctggacatgatcctgaagatggacagcctgcaggacatcaaggccctgctgaccggcctgttcgtgcaggacaacgtgaacaaggacgccgtgaccgacagactggccagcgtggaaaccgacatgcccctgaccctgcggcagcacagaatcagcgccaccagcagcagcgaggaaagcagcaacaagggccagcggcagctgacagtgtctgctgctgcaggcggaagcggaggctctggcggatctgatgccctggacgacttcgacctggatatgctgggcagcgacgccctggatgattttgatctggacatgctgggatctgacgctctggacgatttcgatctcgacatgttgggatcagatgcactggatgactttgacctggacatgctcggatcatgagcggccgctaatcaacctctggattacaaaatttgtgaaagattgactggtattcttaactatgttgctccttttacgctatgtggatacgctgctttaatgcctttgtatcatgctattgcttcccgtatggctttcattttctcctccttgtataaatcctggttgctgtctctttatgaggagttgtggcccgttgtcaggcaacgtggcgtggtgtgcactgtgtttgctgacgcaacccccactggttggggcattgccaccacctgtcagctcctttccgggactttcgctttccccctccctattgccacggcggaactcatcgccgcctgccttgcccgctgctggacaggggctcggctgttgggcactgacaattccgtggtgttgtcggggaaatcatcgtcctttccttggctgctcgcctgtgttgccacctggattctgcgcgggacgtccttctgctacgtcccttcggccctcaatccagcggaccttccttcccgcggcctgctgccggctctgcggcctcttccgcgtcttcgccttcgccctcagacgagtcggatctccctttgggccgcctccccgcatgcgatcgcttagccactttttaaaagaaaaggggggactggaagggctaattcactcccaacgaagacaagatctgctttttgcttgtactgggtctctctggttagaccagatctgagcctgggagctctctggctaactagggaacccactgcttaagcctcaataaagcttgccttgagtgcttcaagtagtgtgtgcccgtctgttgtgtgactctggtaactagagatccctcagacccttttagtcagtgtggaaaatctctagcagcatctagaattaattccgtgtattctatagtgtcacctaaatcgtatgtgtatgatacataaggttatgtattaattgtagccgcgttctaacgacaatatgtacaagcctaattgtgtagcatctggcttactgaagcagaccctatcatctctctcgtaaactgccgtcagagtcggtttggttggacgaaccttctgagtttctggtaacgccgtcccgcacccggaaatggtcagcgaaccaatcagcagggtcatcgctagccagatcctctacgccggacgcatcgtggccggcatcaccggcgccacaggtgcggttgctggcgcctatatcgccgacatcaccgatggggaagatcgggctcgccacttcgggctcatgagcgcttgtttcggcgtgggtatggtggcaggccccgtggccgggggactgttgggcgccatctccttgcatgcaccattccttgcggcggcggtgctcaacggcctcaacctactactgggctgcttcctaatgcaggagtcgcataagggagagcgtcgaatggtgcactctcagtacaatctgctctgatgccgcatagttaagccagccccgacacccgccaacacccgctgacgcgccctgacgggcttgtctgctcccggcatccgcttacagacaagctgtgaccgtctccgggagctgcatgtgtcagaggttttcaccgtcatcaccgaaacgcgcgagacgaaagggcctcgtgatacgcctatttttataggttaatgtcatgataataatggtttcttagacgtcaggtggcacttttcggggaaatgtgcgcggaacccctatttgtttatttttctaaatacattcaaatatgtatccgctcatgagacaataaccctgataaatgcttcaataatattgaaaaaggaagagtatgagtattcaacatttccgtgtcgcccttattcccttttttgcggcattttgccttcctgtttttgctcacccagaaacgctggtgaaagtaaaagatgctgaagatcagttgggtgcacgagtgggttacatcgaactggatctcaacagcggtaagatccttgagagttttcgccccgaagaacgttttccaatgatgagcacttttaaagttctgctatgtggcgcggtattatcccgtattgacgccgggcaagagcaactcggtcgccgcatacactattctcagaatgacttggttgagtactcaccagtcacagaaaagcatcttacggatggcatgacagtaagagaattatgcagtgctgccataaccatgagtgataacactgcggccaacttacttctgacaacgatcggaggaccgaaggagctaaccgcttttttgcacaacatgggggatcatgtaactcgccttgatcgttgggaaccggagctgaatgaagccataccaaacgacgagcgtgacaccacgatgcctgtagcaatggcaacaacgttgcgcaaactattaactggcgaactacttactctagcttcccggcaacaattaatagactggatggaggcggataaagttgcaggaccacttctgcgctcggcccttccggctggctggtttattgctgataaatctggagccggtgagcgtgggtctcgcggtatcattgcagcactggggccagatggtaagccctcccgtatcgtagttatctacacgacggggagtcaggcaactatggatgaacgaaatagacagatcgctgagataggtgcctcactgattaagcattggtaactgtcagaccaagtttactcatatatactttagattgatttaaaacttcatttttaatttaaaaggatctaggtgaagatcctttttgataatctcatgaccaaaatcccttaacgtgagttttcgttccactgagcgtcagaccccgtagaaaagatcaaaggatcttcttgagatcctttttttctgcgcgtaatctgctgcttgcaaacaaaaaaaccaccgctaccagcggtggtttgtttgccggatcaagagctaccaactctttttccgaaggtaactggcttcagcagagcgcagataccaaatactgttcttctagtgtagccgtagttaggccaccacttcaagaactctgtagcaccgcctacatacctcgctctgctaatcctgttaccagtggctgctgccagtggcgataagtcgtgtcttaccgggttggactcaagacgatagttaccggataaggcgcagcggtcgggctgaacggggggttcgtgcacacagcccagcttggagcgaacgacctacaccgaactgagatacctacagcgtgagctatgagaaagcgccacgcttcccgaagggagaaaggcggacaggtatccggtaagcggcagggtcggaacaggagagcgcacgagggagcttccagggggaaacgcctggtatctttatagtcctgtcgggtttcgccacctctgacttgagcgtcgatttttgtgatgctcgtcaggggggcggagcctatggaaaaacgccagcaacgcggcctttttacggttcctggccttttgctggccttttgctcacatgttctttcctgcgttatcccctgattctgtggataaccgtattaccgcctttgagtgagctgataccgctcgccgcagccgaacgaccgagcgcagcgagtcagtgagcgaggaagcggaagagcgcccaatacgcaaaccgcctctccccgcgcgttggccgattcattaatgcagctgtggaatgtgtgtcagttagggtgtggaaagtccccaggctccccagcaggcagaagtatgcaaagcatgcatctcaattagtcagcaaccaggtgtggaaagtccccaggctccccagcaggcagaagtatgcaaagcatgcatctcaattagtcagcaaccatagtcccgcccctaactccgcccatcccgcccctaactccgcccagttccgcccattctccgccccatcgctgactaattttttttatttatgcagaggccgaggccgcctcggcctctgagctattccagaagtagtgaggaggcttttttggaggcctaggcttttgcaaaaagcttggacacaagacaggcttgcgagatatgtttgagaataccactttatcccgcgtcagggagaggcagtgcgtaaaaagacgcggactcatgtgaaatactggtttttagtgcgccagatctctataatctcgcgcaacctattttcccctcgaacactttttaagccgtagataaacaggctgggacacttcacatgagcgaaaaatacatcgtcacctgggacatgttgcagatccatgcacgtaaactcgcaagccgactgatgccttctgaacaatggaaaggcattattgccgtaagccgtggcggtctgtaccgggtgcgttactggcgcgtgaactgggtattcgtcatgtcgataccgtttgtatttccagctacgatcacgacaaccagcgcgagcttaaagtgctgaaacgcgcagaaggcgatggcgaaggcttcatcgttattgatgacctggtggataccggtggtactgcggttgcgattcgtgaaatgtatccaaaagcgcactttgtcaccatcttcgcaaaaccggctggtcgtccgctggttgatgactatgttgttgatatcccgcaagatacctggattgaacagccgtgggatatgggcgtcgtattcgtcccgccaatctccggtcgctaatcttttcaacgcctggcactgccgggcgttgttctttttaacttcaggcgggttacaatagtttccagtaagtattctggaggctgcatccatgacacaggcaaacctgagcgaaaccctgttcaaaccccgctttaaacatcctgaaacctcgacgctagtccgccgctttaatcacggcgcacaaccgcctgtgcagtcggcccttgatggtaaaaccatccctcactggtatcgcatgattaaccgtctgatgtggatctggcgcggcattgacccacgcgaaatcctcgacgtccaggcacgtattgtgatgagcgatgccgaacgtaccgacgatgatttatacgatacggtgattggctaccgtggcggcaactggatttatgagtgggccccggatctttgtgaaggaaccttacttctgtggtgtgacataattggacaaactacctacagagatttaaagctctaaggtaaatataaaatttttaagtgtataatgtgttaaactactgattctaattgtttgtgtattttagattccaacctatggaactgatgaatgggagcagtggtggaatgcctttaatgaggaaaacctgttttgctcagaagaaatgccatctagtgatgatgaggctactgctgactctcaacattctactcctccaaaaaagaagagaaaggtagaagaccccaaggactttccttcagaattgctaagttttttgagtcatgctgtgtttagtaatagaactcttgcttgctttgctatttacaccacaaaggaaaaagctgcactgctatacaagaaaattatggaaaaatattctgtaacctttataagtaggcataacagttataatcataacatactgttttttcttactccacacaggcatagagtgtctgctattaataactatgctcaaaaattgtgtacctttagctttttaatttgtaaaggggttaataaggaatatttgatgtatagtgccttgactagagatcataatcagccataccacatttgtagaggttttacttgctttaaaaaacctcccacacctccccctgaacctgaaacataaaatgaatgcaattgttgttgttaacttgtttattgcagcttataatggttacaaataaagcaatagcatcacaaatttcacaaataaagcatttttttcactgcattctagttgtggtttgtccaaactcatcaatgtatcttatcatgtctggatcaactggataactcaagctaaccaaaatcatcccaaacttcccaccccataccctattaccactgccaattacctagtggtttcatttactctaaacctgtgattcctctgaattattttcattttaaagaaattgtatttgttaaatatgtactacaaacttagtagt

SEQ ID NO: 174 - DNA, 11319 bp, Artificial sequence
  Synthetic construct
tggaagggctaattcactcccaaagaagacaagatatccttgatctgtggatctaccacacacaaggctacttccctgattagcagaactacacaccagggccaggggtcagatatccactgacctttggatggtgctacaagctagtaccagttgagccagataaggtagaagaggccaataaaggagagaacaccagcttgttacaccctgtgagcctgcatgggatggatgacccggagagagaagtgttagagtggaggtttgacagccgcctagcatttcatcacgtggcccgagagctgcatccggagtacttcaagaactgctgatatcgagcttgctacaagggactttccgctggggactttccagggaggcgtggcctgggcgggactggggagtggcgagccctcagatcctgcatataagcagctgctttttgcctgtactgggtctctctggttagaccagatctgagcctgggagctctctggctaactagggaacccactgcttaagcctcaataaagcttgccttgagtgcttcaagtagtgtgtgcccgtctgttgtgtgactctggtaactagagatccctcagacccttttagtcagtgtggaaaatctctagcagtggcgcccgaacagggacttgaaagcgaaagggaaaccagaggagctctctcgacgcaggactcggcttgctgaagcgcgcacggcaagaggcgaggggcggcgactggtgagtacgccaaaaattttgactagcggaggctagaaggagagagatgggtgcgagagcgtcagtattaagcgggggagaattagatcgcgatgggaaaaaattcggttaaggccagggggaaagaaaaaatataaattaaaacatatagtatgggcaagcagggagctagaacgattcgcagttaatcctggcctgttagaaacatcagaaggctgtagacaaatactgggacagctacaaccatcccttcagacaggatcagaagaacttagatcattatataatacagtagcaaccctctattgtgtgcatcaaaggatagagataaaagacaccaaggaagctttagacaagatagaggaagagcaaaacaaaagtaagaccaccgcacagcaagcggccggtgatcttcagacctggacgatatatatgagggacaattggagaagtgaattatataaatataaagtagtaaaaattgaaccattaggagtagcacccaccaaggcaaagagaagagtggtgcagagagaaaaaagagcagtgggaataggagctttgttccttgggttcttgggagcagcaggaagcactatgggcgcagcgtcaatgacgctgacggtacaggccagacaattattgtctggtatagtgcagcagcagaacaatttgctgagggctattgaggcgcaacagcatctgttgcaactcacagtctggggcatcaagcagctccaggcaagaatcctggctgtggaaagatacctaaaggatcaacagctcctggggatttggggttgctctggaaaactcatttgcaccactgctgtgccttggaatgctagttggagtaataaatctctggaacagatttggaatcacacgacctggatggagtgggacagagaaattaacaattacacaagcttaatacactccttaattgaagaatcgcaaaaccagcaagaaaagaatgaacaagaattattggaattagataaatgggcaagtttgtggaattggtttaacataacaaattggctgtggtatataaaattattcataatgatagtaggaggcttggtaggtttaagaatagtttttgctgtactttctatagtgaatagagttaggcagggatattcaccattatcgtttcagacccacctcccaaccccgaggggacccgacaggcccgaaggaatagaagaagaaggtggagagagagacagagacagatccattcgattagtgaacggatctcgacggtatcgccaaatggcagtattcatccacaattttaaaagaaaaggggggattggggggtacagtgcaggggaaagaatagtagacataatagcaacagacatacaaactaaagaattacaaaaacaaattacaaaaattcaaaattttcgggtttattacagggacagcagagatccagtttggatcgataagcttgatatcgaattcgggtaggggaggcgcttttcccaaggcagtctggagcatgcgctttagcagccccgctgggcacttggcgctacacaagtggcctctggcctcgcacacattccacatccaccggtaggcgccaaccggctccgttctttggtggccccttcgcgccaccttctactcctcccctagtcaggaagttcccccccgccccgcagctcgcgtcgtgcaggacgtgacaaatggaagtagcacgtctcactagtctcgtgcagatggacagcaccgctgagcaatggaagcgggtaggcctttggggcagcggccaatagcagctttgctccttcgctttctgggctcagaggctgggaaggggtgggtccgggggcgggctcaggggcgggctcaggggcggggcgggcgcccgaaggtcctccggaggcccggcattctgcacgcttcaaaagcgcacgtctgccgcgctgttctcctcttcctcatctccgggcctttcgacctgcagcccaaggccaccatggccttaccagtgaccgccttgctcctgccgctggccttgctgctccacgccgccaggccggagcagaagctgatcagcgaggaggacctggacatccagatgacacagactacatcctccctgtctgcctctctgggagacagagtcaccatcagttgcagggcaagtcaggacattagtaaatatttaaattggtatcagcagaaaccagatggaactgttaaactcctgatctaccatacatcaagattacactcaggagtcccatcaaggttcagtggcagtgggtctggaacagattattctctcaccattagcaacctggagcaagaagatattgccacttacttttgccaacagggtaatacgcttccgtacacgttcggaggggggaccaagctggagatcacaggtggcggtggctcgggcggtggtgggtcgggtggcggcggatctgaggtgaaactgcaggagtcaggacctggcctggtggcgccctcacagagcctgtccgtcacatgcactgtctcaggggtctcattacccgactatggtgtaagctggattcgccagcctccacgaaagggtctggagtggctgggagtaatatggggtagtgaaaccacatactataattcagctctcaaatccagactgaccatcatcaaggacaactccaagagccaagttttcttaaaaatgaacagtctgcaaactgatgacacagccatttactactgtgccaaacattattactacggtggtagctatgctatggactactggggccaaggaacctcagtcaccgtctcctcaaccacgacgccagcgccgcgaccaccaacaccggcgcccaccatcgcgtcgcagcccctgtccctgcgcccagaggcgtgctttatgtacgtggcagccgcggcatttgtacttctgtttttcgtggggtgcggtgtgcttctcagcaagaggaaacggaagcaccccaagaaaaagaggaaggtgtctagaccaggcgaacgaccgtttcaatgccggatatgtatgaggaacttctcccagcagaccaatctcacgcggcacacccgaacacatacaggagaaaagccattccaatgtcgaatttgtatgcgcaatttttcacagaaggctaacctcggcgttcacctccgcacacatactggttcacagaagccctttcagtgcaggatttgtatgcgcaactttagcgatcactcatctctgaaacgccacactagaacgcatacaggtgagaagcctttccagtgtcgcatctgtatgcggaacttcagccgagcggatatgcttagacgccatttgcgaactcacaccggttctcaaaaaccttttcagtgccgaatttgtatgcgcaacttcagcgagaaacagaacctggcacgccacacgcgcacgcacaccggggaaaaaccgtttcaatgtcgaatctgcatgcgcaattttagcgacccctctaatcttaggaggcatctgcgcacacacttgcgggatgagtttcccaccatggtgtttccttctgggcagatcagccaggcctcggccttggccccggcccctccccaagtcctgccccaggctccagcccctgcccctgctccagccatggtatcagctctggcccaggccccagcccctgtcccagtcctagccccaggccctcctcaggctgtggccccacctgcccccaagcccacccaggctggggaaggaacgctgtcagaggccctgctgcagctgcagtttgatgatgaagacctgggggccttgcttggcaacagcacagacccagctgtgttcacagacctggcatccgtcgacaactccgagtttcagcagctgctgaaccagggcatacctgtggccccccacacaactgagcccatgctgatggagtaccctgaggctataactcgcctagtgacaggggcccagaggccccccgacccagctcctgctccactgggggccccggggctccccaatggcctcctttcaggagatgaagacttctcctccattgcggacatggacttctcagccctgctgagtcagatcagctccagtgggcagggaggaggtggaagcggcttcagcgtggacaccagtgccctgctggacctgttcagcccctcggtgaccgtgcccgacatgagcctgcctgaccttgacagcagcctggccagtatccaagagctcctgtctccccaggagccccccaggcctcccgaggcagagaacagcagcccggattcagggaagcagctggtgcactacacagcgcagccgctgttcctgctggaccccggctccgtggacaccgggagcaacgacctgccggtgctgtttgagctgggagagggctcctacttctccgaaggggacggcttcgccgaggaccccaccatctccctgctgacaggctcggagcctcccaaagccaaggaccccactgtctcctaagcggccgctaatcaacctctggattacaaaatttgtgaaagattgactggtattcttaactatgttgctccttttacgctatgtggatacgctgctttaatgcctttgtatcatgctattgcttcccgtatggctttcattttctcctccttgtataaatcctggttgctgtctctttatgaggagttgtggcccgttgtcaggcaacgtggcgtggtgtgcactgtgtttgctgacgcaacccccactggttggggcattgccaccacctgtcagctcctttccgggactttcgctttccccctccctattgccacggcggaactcatcgccgcctgccttgcccgctgctggacaggggctcggctgttgggcactgacaattccgtggtgttgtcggggaaatcatcgtcctttccttggctgctcgcctgtgttgccacctggattctgcgcgggacgtccttctgctacgtcccttcggccctcaatccagcggaccttccttcccgcggcctgctgccggctctgcggcctcttccgcgtcttcgccttcgccctcagacgagtcggatctccctttgggccgcctccccgcatgcgatcgcttagccactttttaaaagaaaaggggggactggaagggctaattcactcccaacgaagacaagatctgctttttgcttgtactgggtctctctggttagaccagatctgagcctgggagctctctggctaactagggaacccactgcttaagcctcaataaagcttgccttgagtgcttcaagtagtgtgtgcccgtctgttgtgtgactctggtaactagagatccctcagacccttttagtcagtgtggaaaatctctagcagcatctagaattaattccgtgtattctatagtgtcacctaaatcgtatgtgtatgatacataaggttatgtattaattgtagccgcgttctaacgacaatatgtacaagcctaattgtgtagcatctggcttactgaagcagaccctatcatctctctcgtaaactgccgtcagagtcggtttggttggacgaaccttctgagtttctggtaacgccgtcccgcacccggaaatggtcagcgaaccaatcagcagggtcatcgctagccagatcctctacgccggacgcatcgtggccggcatcaccggcgccacaggtgcggttgctggcgcctatatcgccgacatcaccgatggggaagatcgggctcgccacttcgggctcatgagcgcttgtttcggcgtgggtatggtggcaggccccgtggccgggggactgttgggcgccatctccttgcatgcaccattccttgcggcggcggtgctcaacggcctcaacctactactgggctgcttcctaatgcaggagtcgcataagggagagcgtcgaatggtgcactctcagtacaatctgctctgatgccgcatagttaagccagccccgacacccgccaacacccgctgacgcgccctgacgggcttgtctgctcccggcatccgcttacagacaagctgtgaccgtctccgggagctgcatgtgtcagaggttttcaccgtcatcaccgaaacgcgcgagacgaaagggcctcgtgatacgcctatttttataggttaatgtcatgataataatggtttcttagacgtcaggtggcacttttcggggaaatgtgcgcggaacccctatttgtttatttttctaaatacattcaaatatgtatccgctcatgagacaataaccctgataaatgcttcaataatattgaaaaaggaagagtatgagtattcaacatttccgtgtcgcccttattcccttttttgcggcattttgccttcctgtttttgctcacccagaaacgctggtgaaagtaaaagatgctgaagatcagttgggtgcacgagtgggttacatcgaactggatctcaacagcggtaagatccttgagagttttcgccccgaagaacgttttccaatgatgagcacttttaaagttctgctatgtggcgcggtattatcccgtattgacgccgggcaagagcaactcggtcgccgcatacactattctcagaatgacttggttgagtactcaccagtcacagaaaagcatcttacggatggcatgacagtaagagaattatgcagtgctgccataaccatgagtgataacactgcggccaacttacttctgacaacgatcggaggaccgaaggagctaaccgcttttttgcacaacatgggggatcatgtaactcgccttgatcgttgggaaccggagctgaatgaagccataccaaacgacgagcgtgacaccacgatgcctgtagcaatggcaacaacgttgcgcaaactattaactggcgaactacttactctagcttcccggcaacaattaatagactggatggaggcggataaagttgcaggaccacttctgcgctcggcccttccggctggctggtttattgctgataaatctggagccggtgagcgtgggtctcgcggtatcattgcagcactggggccagatggtaagccctcccgtatcgtagttatctacacgacggggagtcaggcaactatggatgaacgaaatagacagatcgctgagataggtgcctcactgattaagcattggtaactgtcagaccaagtttactcatatatactttagattgatttaaaacttcatttttaatttaaaaggatctaggtgaagatcctttttgataatctcatgaccaaaatcccttaacgtgagttttcgttccactgagcgtcagaccccgtagaaaagatcaaaggatcttcttgagatcctttttttctgcgcgtaatctgctgcttgcaaacaaaaaaaccaccgctaccagcggtggtttgtttgccggatcaagagctaccaactctttttccgaaggtaactggcttcagcagagcgcagataccaaatactgttcttctagtgtagccgtagttaggccaccacttcaagaactctgtagcaccgcctacatacctcgctctgctaatcctgttaccagtggctgctgccagtggcgataagtcgtgtcttaccgggttggactcaagacgatagttaccggataaggcgcagcggtcgggctgaacggggggttcgtgcacacagcccagcttggagcgaacgacctacaccgaactgagatacctacagcgtgagctatgagaaagcgccacgcttcccgaagggagaaaggcggacaggtatccggtaagcggcagggtcggaacaggagagcgcacgagggagcttccagggggaaacgcctggtatctttatagtcctgtcgggtttcgccacctctgacttgagcgtcgatttttgtgatgctcgtcaggggggcggagcctatggaaaaacgccagcaacgcggcctttttacggttcctggccttttgctggccttttgctcacatgttctttcctgcgttatcccctgattctgtggataaccgtattaccgcctttgagtgagctgataccgctcgccgcagccgaacgaccgagcgcagcgagtcagtgagcgaggaagcggaagagcgcccaatacgcaaaccgcctctccccgcgcgttggccgattcattaatgcagctgtggaatgtgtgtcagttagggtgtggaaagtccccaggctccccagcaggcagaagtatgcaaagcatgcatctcaattagtcagcaaccaggtgtggaaagtccccaggctccccagcaggcagaagtatgcaaagcatgcatctcaattagtcagcaaccatagtcccgcccctaactccgcccatcccgcccctaactccgcccagttccgcccattctccgccccatcgctgactaattttttttatttatgcagaggccgaggccgcctcggcctctgagctattccagaagtagtgaggaggcttttttggaggcctaggcttttgcaaaaagcttggacacaagacaggcttgcgagatatgtttgagaataccactttatcccgcgtcagggagaggcagtgcgtaaaaagacgcggactcatgtgaaatactggtttttagtgcgccagatctctataatctcgcgcaacctattttcccctcgaacactttttaagccgtagataaacaggctgggacacttcacatgagcgaaaaatacatcgtcacctgggacatgttgcagatccatgcacgtaaactcgcaagccgactgatgccttctgaacaatggaaaggcattattgccgtaagccgtggcggtctgtaccgggtgcgttactggcgcgtgaactgggtattcgtcatgtcgataccgtttgtatttccagctacgatcacgacaaccagcgcgagcttaaagtgctgaaacgcgcagaaggcgatggcgaaggcttcatcgttattgatgacctggtggataccggtggtactgcggttgcgattcgtgaaatgtatccaaaagcgcactttgtcaccatcttcgcaaaaccggctggtcgtccgctggttgatgactatgttgttgatatcccgcaagatacctggattgaacagccgtgggatatgggcgtcgtattcgtcccgccaatctccggtcgctaatcttttcaacgcctggcactgccgggcgttgttctttttaacttcaggcgggttacaatagtttccagtaagtattctggaggctgcatccatgacacaggcaaacctgagcgaaaccctgttcaaaccccgctttaaacatcctgaaacctcgacgctagtccgccgctttaatcacggcgcacaaccgcctgtgcagtcggcccttgatggtaaaaccatccctcactggtatcgcatgattaaccgtctgatgtggatctggcgcggcattgacccacgcgaaatcctcgacgtccaggcacgtattgtgatgagcgatgccgaacgtaccgacgatgatttatacgatacggtgattggctaccgtggcggcaactggatttatgagtgggccccggatctttgtgaaggaaccttacttctgtggtgtgacataattggacaaactacctacagagatttaaagctctaaggtaaatataaaatttttaagtgtataatgtgttaaactactgattctaattgtttgtgtattttagattccaacctatggaactgatgaatgggagcagtggtggaatgcctttaatgaggaaaacctgttttgctcagaagaaatgccatctagtgatgatgaggctactgctgactctcaacattctactcctccaaaaaagaagagaaaggtagaagaccccaaggactttccttcagaattgctaagttttttgagtcatgctgtgtttagtaatagaactcttgcttgctttgctatttacaccacaaaggaaaaagctgcactgctatacaagaaaattatggaaaaatattctgtaacctttataagtaggcataacagttataatcataacatactgttttttcttactccacacaggcatagagtgtctgctattaataactatgctcaaaaattgtgtacctttagctttttaatttgtaaaggggttaataaggaatatttgatgtatagtgccttgactagagatcataatcagccataccacatttgtagaggttttacttgctttaaaaaacctcccacacctccccctgaacctgaaacataaaatgaatgcaattgttgttgttaacttgtttattgcagcttataatggttacaaataaagcaatagcatcacaaatttcacaaataaagcatttttttcactgcattctagttgtggtttgtccaaactcatcaatgtatcttatcatgtctggatcaactggataactcaagctaaccaaaatcatcccaaacttcccaccccataccctattaccactgccaattacctagtggtttcatttactctaaacctgtgattcctctgaattattttcattttaaagaaattgtatttgttaaatatgtactacaaacttagtagt

SEQ ID NO: 175 - DNA, 11121 bp, Artificial sequence
  Synthetic construct
tggaagggctaattcactcccaaagaagacaagatatccttgatctgtggatctaccacacacaaggctacttccctgattagcagaactacacaccagggccaggggtcagatatccactgacctttggatggtgctacaagctagtaccagttgagccagataaggtagaagaggccaataaaggagagaacaccagcttgttacaccctgtgagcctgcatgggatggatgacccggagagagaagtgttagagtggaggtttgacagccgcctagcatttcatcacgtggcccgagagctgcatccggagtacttcaagaactgctgatatcgagcttgctacaagggactttccgctggggactttccagggaggcgtggcctgggcgggactggggagtggcgagccctcagatcctgcatataagcagctgctttttgcctgtactgggtctctctggttagaccagatctgagcctgggagctctctggctaactagggaacccactgcttaagcctcaataaagcttgccttgagtgcttcaagtagtgtgtgcccgtctgttgtgtgactctggtaactagagatccctcagacccttttagtcagtgtggaaaatctctagcagtggcgcccgaacagggacttgaaagcgaaagggaaaccagaggagctctctcgacgcaggactcggcttgctgaagcgcgcacggcaagaggcgaggggcggcgactggtgagtacgccaaaaattttgactagcggaggctagaaggagagagatgggtgcgagagcgtcagtattaagcgggggagaattagatcgcgatgggaaaaaattcggttaaggccagggggaaagaaaaaatataaattaaaacatatagtatgggcaagcagggagctagaacgattcgcagttaatcctggcctgttagaaacatcagaaggctgtagacaaatactgggacagctacaaccatcccttcagacaggatcagaagaacttagatcattatataatacagtagcaaccctctattgtgtgcatcaaaggatagagataaaagacaccaaggaagctttagacaagatagaggaagagcaaaacaaaagtaagaccaccgcacagcaagcggccggtgatcttcagacctggacgatatatatgagggacaattggagaagtgaattatataaatataaagtagtaaaaattgaaccattaggagtagcacccaccaaggcaaagagaagagtggtgcagagagaaaaaagagcagtgggaataggagctttgttccttgggttcttgggagcagcaggaagcactatgggcgcagcgtcaatgacgctgacggtacaggccagacaattattgtctggtatagtgcagcagcagaacaatttgctgagggctattgaggcgcaacagcatctgttgcaactcacagtctggggcatcaagcagctccaggcaagaatcctggctgtggaaagatacctaaaggatcaacagctcctggggatttggggttgctctggaaaactcatttgcaccactgctgtgccttggaatgctagttggagtaataaatctctggaacagatttggaatcacacgacctggatggagtgggacagagaaattaacaattacacaagcttaatacactccttaattgaagaatcgcaaaaccagcaagaaaagaatgaacaagaattattggaattagataaatgggcaagtttgtggaattggtttaacataacaaattggctgtggtatataaaattattcataatgatagtaggaggcttggtaggtttaagaatagtttttgctgtactttctatagtgaatagagttaggcagggatattcaccattatcgtttcagacccacctcccaaccccgaggggacccgacaggcccgaaggaatagaagaagaaggtggagagagagacagagacagatccattcgattagtgaacggatctcgacggtatcgccaaatggcagtattcatccacaattttaaaagaaaaggggggattggggggtacagtgcaggggaaagaatagtagacataatagcaacagacatacaaactaaagaattacaaaaacaaattacaaaaattcaaaattttcgggtttattacagggacagcagagatccagtttggatcgataagcttgatatcgaattcgggtaggggaggcgcttttcccaaggcagtctggagcatgcgctttagcagccccgctgggcacttggcgctacacaagtggcctctggcctcgcacacattccacatccaccggtaggcgccaaccggctccgttctttggtggccccttcgcgccaccttctactcctcccctagtcaggaagttcccccccgccccgcagctcgcgtcgtgcaggacgtgacaaatggaagtagcacgtctcactagtctcgtgcagatggacagcaccgctgagcaatggaagcgggtaggcctttggggcagcggccaatagcagctttgctccttcgctttctgggctcagaggctgggaaggggtgggtccgggggcgggctcaggggcgggctcaggggcggggcgggcgcccgaaggtcctccggaggcccggcattctgcacgcttcaaaagcgcacgtctgccgcgctgttctcctcttcctcatctccgggcctttcgacctgcagcccaaggccaccatggccttaccagtgaccgccttgctcctgccgctggccttgctgctccacgccgccaggccggagcagaagctgatcagcgaggaggacctggacatccagatgacacagactacatcctccctgtctgcctctctgggagacagagtcaccatcagttgcagggcaagtcaggacattagtaaatatttaaattggtatcagcagaaaccagatggaactgttaaactcctgatctaccatacatcaagattacactcaggagtcccatcaaggttcagtggcagtgggtctggaacagattattctctcaccattagcaacctggagcaagaagatattgccacttacttttgccaacagggtaatacgcttccgtacacgttcggaggggggaccaagctggagatcacaggtggcggtggctcgggcggtggtgggtcgggtggcggcggatctgaggtgaaactgcaggagtcaggacctggcctggtggcgccctcacagagcctgtccgtcacatgcactgtctcaggggtctcattacccgactatggtgtaagctggattcgccagcctccacgaaagggtctggagtggctgggagtaatatggggtagtgaaaccacatactataattcagctctcaaatccagactgaccatcatcaaggacaactccaagagccaagttttcttaaaaatgaacagtctgcaaactgatgacacagccatttactactgtgccaaacattattactacggtggtagctatgctatggactactggggccaaggaacctcagtcaccgtctcctcaaccacgacgccagcgccgcgaccaccaacaccggcgcccaccatcgcgtcgcagcccctgtccctgcgcccagaggcgtgctttatgtacgtggcagccgcggcatttgtacttctgtttttcgtggggtgcggtgtgcttctcagcaagaggaaacggaagcaccccaagaaaaagaggaaggtgtctagaccaggcgaacgaccgtttcaatgccggatatgtatgaggaacttctcccagcagaccaatctcacgcggcacacccgaacacatacaggagaaaagccattccaatgtcgaatttgtatgcgcaatttttcacagaaggctaacctcggcgttcacctccgcacacatactggttcacagaagccctttcagtgcaggatttgtatgcgcaactttagcgatcactcatctctgaaacgccacactagaacgcatacaggtgagaagcctttccagtgtcgcatctgtatgcggaacttcagccgagcggatatgcttagacgccatttgcgaactcacaccggttctcaaaaaccttttcagtgccgaatttgtatgcgcaacttcagcgagaaacagaacctggcacgccacacgcgcacgcacaccggggaaaaaccgtttcaatgtcgaatctgcatgcgcaattttagcgacccctctaatcttaggaggcatctgcgcacacacttgcgggatgagtttcccaccatggtgtttccttctgggcagatcagccaggcctcggccttggccccggcccctccccaagtcctgccccaggctccagcccctgcccctgctccagccatggtatcagctctggcccaggccccagcccctgtcccagtcctagccccaggccctcctcaggctgtggccccacctgcccccaagcccacccaggctggggaaggaacgctgtcagaggccctgctgcagctgcagtttgatgatgaagacctgggggccttgcttggcaacagcacagacccagctgtgttcacagacctggcatccgtcgacaactccgagtttcagcagctgctgaaccagggcatacctgtggccccccacacaactgagcccatgctgatggagtaccctgaggctataactcgcctagtgacaggggcccagaggccccccgacccagctcctgctccactgggggccccggggctccccaatggcctcctttcaggagatgaagacttctcctccattgcggacatggacttctcagccctgctgagtcagatcagctccagtgggcagggaggaggtggaagcgaccaaagcacctttgacattttgcaggatttggagttttcttctgggtccccaggtaaagagacgaatgagagtccttggagatcagacctgttgatagatgaaaactgtttgctttctcctctggcgggagaagacgattcattccttttggaaggaaactcgaatgaggactaagcggccgctaatcaacctctggattacaaaatttgtgaaagattgactggtattcttaactatgttgctccttttacgctatgtggatacgctgctttaatgcctttgtatcatgctattgcttcccgtatggctttcattttctcctccttgtataaatcctggttgctgtctctttatgaggagttgtggcccgttgtcaggcaacgtggcgtggtgtgcactgtgtttgctgacgcaacccccactggttggggcattgccaccacctgtcagctcctttccgggactttcgctttccccctccctattgccacggcggaactcatcgccgcctgccttgcccgctgctggacaggggctcggctgttgggcactgacaattccgtggtgttgtcggggaaatcatcgtcctttccttggctgctcgcctgtgttgccacctggattctgcgcgggacgtccttctgctacgtcccttcggccctcaatccagcggaccttccttcccgcggcctgctgccggctctgcggcctcttccgcgtcttcgccttcgccctcagacgagtcggatctccctttgggccgcctccccgcatgcgatcgcttagccactttttaaaagaaaaggggggactggaagggctaattcactcccaacgaagacaagatctgctttttgcttgtactgggtctctctggttagaccagatctgagcctgggagctctctggctaactagggaacccactgcttaagcctcaataaagcttgccttgagtgcttcaagtagtgtgtgcccgtctgttgtgtgactctggtaactagagatccctcagacccttttagtcagtgtggaaaatctctagcagcatctagaattaattccgtgtattctatagtgtcacctaaatcgtatgtgtatgatacataaggttatgtattaattgtagccgcgttctaacgacaatatgtacaagcctaattgtgtagcatctggcttactgaagcagaccctatcatctctctcgtaaactgccgtcagagtcggtttggttggacgaaccttctgagtttctggtaacgccgtcccgcacccggaaatggtcagcgaaccaatcagcagggtcatcgctagccagatcctctacgccggacgcatcgtggccggcatcaccggcgccacaggtgcggttgctggcgcctatatcgccgacatcaccgatggggaagatcgggctcgccacttcgggctcatgagcgcttgtttcggcgtgggtatggtggcaggccccgtggccgggggactgttgggcgccatctccttgcatgcaccattccttgcggcggcggtgctcaacggcctcaacctactactgggctgcttcctaatgcaggagtcgcataagggagagcgtcgaatggtgcactctcagtacaatctgctctgatgccgcatagttaagccagccccgacacccgccaacacccgctgacgcgccctgacgggcttgtctgctcccggcatccgcttacagacaagctgtgaccgtctccgggagctgcatgtgtcagaggttttcaccgtcatcaccgaaacgcgcgagacgaaagggcctcgtgatacgcctatttttataggttaatgtcatgataataatggtttcttagacgtcaggtggcacttttcggggaaatgtgcgcggaacccctatttgtttatttttctaaatacattcaaatatgtatccgctcatgagacaataaccctgataaatgcttcaataatattgaaaaaggaagagtatgagtattcaacatttccgtgtcgcccttattcccttttttgcggcattttgccttcctgtttttgctcacccagaaacgctggtgaaagtaaaagatgctgaagatcagttgggtgcacgagtgggttacatcgaactggatctcaacagcggtaagatccttgagagttttcgccccgaagaacgttttccaatgatgagcacttttaaagttctgctatgtggcgcggtattatcccgtattgacgccgggcaagagcaactcggtcgccgcatacactattctcagaatgacttggttgagtactcaccagtcacagaaaagcatcttacggatggcatgacagtaagagaattatgcagtgctgccataaccatgagtgataacactgcggccaacttacttctgacaacgatcggaggaccgaaggagctaaccgcttttttgcacaacatgggggatcatgtaactcgccttgatcgttgggaaccggagctgaatgaagccataccaaacgacgagcgtgacaccacgatgcctgtagcaatggcaacaacgttgcgcaaactattaactggcgaactacttactctagcttcccggcaacaattaatagactggatggaggcggataaagttgcaggaccacttctgcgctcggcccttccggctggctggtttattgctgataaatctggagccggtgagcgtgggtctcgcggtatcattgcagcactggggccagatggtaagccctcccgtatcgtagttatctacacgacggggagtcaggcaactatggatgaacgaaatagacagatcgctgagataggtgcctcactgattaagcattggtaactgtcagaccaagtttactcatatatactttagattgatttaaaacttcatttttaatttaaaaggatctaggtgaagatcctttttgataatctcatgaccaaaatcccttaacgtgagttttcgttccactgagcgtcagaccccgtagaaaagatcaaaggatcttcttgagatcctttttttctgcgcgtaatctgctgcttgcaaacaaaaaaaccaccgctaccagcggtggtttgtttgccggatcaagagctaccaactctttttccgaaggtaactggcttcagcagagcgcagataccaaatactgttcttctagtgtagccgtagttaggccaccacttcaagaactctgtagcaccgcctacatacctcgctctgctaatcctgttaccagtggctgctgccagtggcgataagtcgtgtcttaccgggttggactcaagacgatagttaccggataaggcgcagcggtcgggctgaacggggggttcgtgcacacagcccagcttggagcgaacgacctacaccgaactgagatacctacagcgtgagctatgagaaagcgccacgcttcccgaagggagaaaggcggacaggtatccggtaagcggcagggtcggaacaggagagcgcacgagggagcttccagggggaaacgcctggtatctttatagtcctgtcgggtttcgccacctctgacttgagcgtcgatttttgtgatgctcgtcaggggggcggagcctatggaaaaacgccagcaacgcggcctttttacggttcctggccttttgctggccttttgctcacatgttctttcctgcgttatcccctgattctgtggataaccgtattaccgcctttgagtgagctgataccgctcgccgcagccgaacgaccgagcgcagcgagtcagtgagcgaggaagcggaagagcgcccaatacgcaaaccgcctctccccgcgcgttggccgattcattaatgcagctgtggaatgtgtgtcagttagggtgtggaaagtccccaggctccccagcaggcagaagtatgcaaagcatgcatctcaattagtcagcaaccaggtgtggaaagtccccaggctccccagcaggcagaagtatgcaaagcatgcatctcaattagtcagcaaccatagtcccgcccctaactccgcccatcccgcccctaactccgcccagttccgcccattctccgccccatcgctgactaattttttttatttatgcagaggccgaggccgcctcggcctctgagctattccagaagtagtgaggaggcttttttggaggcctaggcttttgcaaaaagcttggacacaagacaggcttgcgagatatgtttgagaataccactttatcccgcgtcagggagaggcagtgcgtaaaaagacgcggactcatgtgaaatactggtttttagtgcgccagatctctataatctcgcgcaacctattttcccctcgaacactttttaagccgtagataaacaggctgggacacttcacatgagcgaaaaatacatcgtcacctgggacatgttgcagatccatgcacgtaaactcgcaagccgactgatgccttctgaacaatggaaaggcattattgccgtaagccgtggcggtctgtaccgggtgcgttactggcgcgtgaactgggtattcgtcatgtcgataccgtttgtatttccagctacgatcacgacaaccagcgcgagcttaaagtgctgaaacgcgcagaaggcgatggcgaaggcttcatcgttattgatgacctggtggataccggtggtactgcggttgcgattcgtgaaatgtatccaaaagcgcactttgtcaccatcttcgcaaaaccggctggtcgtccgctggttgatgactatgttgttgatatcccgcaagatacctggattgaacagccgtgggatatgggcgtcgtattcgtcccgccaatctccggtcgctaatcttttcaacgcctggcactgccgggcgttgttctttttaacttcaggcgggttacaatagtttccagtaagtattctggaggctgcatccatgacacaggcaaacctgagcgaaaccctgttcaaaccccgctttaaacatcctgaaacctcgacgctagtccgccgctttaatcacggcgcacaaccgcctgtgcagtcggcccttgatggtaaaaccatccctcactggtatcgcatgattaaccgtctgatgtggatctggcgcggcattgacccacgcgaaatcctcgacgtccaggcacgtattgtgatgagcgatgccgaacgtaccgacgatgatttatacgatacggtgattggctaccgtggcggcaactggatttatgagtgggccccggatctttgtgaaggaaccttacttctgtggtgtgacataattggacaaactacctacagagatttaaagctctaaggtaaatataaaatttttaagtgtataatgtgttaaactactgattctaattgtttgtgtattttagattccaacctatggaactgatgaatgggagcagtggtggaatgcctttaatgaggaaaacctgttttgctcagaagaaatgccatctagtgatgatgaggctactgctgactctcaacattctactcctccaaaaaagaagagaaaggtagaagaccccaaggactttccttcagaattgctaagttttttgagtcatgctgtgtttagtaatagaactcttgcttgctttgctatttacaccacaaaggaaaaagctgcactgctatacaagaaaattatggaaaaatattctgtaacctttataagtaggcataacagttataatcataacatactgttttttcttactccacacaggcatagagtgtctgctattaataactatgctcaaaaattgtgtacctttagctttttaatttgtaaaggggttaataaggaatatttgatgtatagtgccttgactagagatcataatcagccataccacatttgtagaggttttacttgctttaaaaaacctcccacacctccccctgaacctgaaacataaaatgaatgcaattgttgttgttaacttgtttattgcagcttataatggttacaaataaagcaatagcatcacaaatttcacaaataaagcatttttttcactgcattctagttgtggtttgtccaaactcatcaatgtatcttatcatgtctggatcaactggataactcaagctaaccaaaatcatcccaaacttcccaccccataccctattaccactgccaattacctagtggtttcatttactctaaacctgtgattcctctgaattattttcattttaaagaaattgtatttgttaaatatgtactacaaacttagtagt

SEQ ID NO: 176 - DNA, 11319 bp, Artificial sequence
  Synthetic construct
tggaagggctaattcactcccaaagaagacaagatatccttgatctgtggatctaccacacacaaggctacttccctgattagcagaactacacaccagggccaggggtcagatatccactgacctttggatggtgctacaagctagtaccagttgagccagataaggtagaagaggccaataaaggagagaacaccagcttgttacaccctgtgagcctgcatgggatggatgacccggagagagaagtgttagagtggaggtttgacagccgcctagcatttcatcacgtggcccgagagctgcatccggagtacttcaagaactgctgatatcgagcttgctacaagggactttccgctggggactttccagggaggcgtggcctgggcgggactggggagtggcgagccctcagatcctgcatataagcagctgctttttgcctgtactgggtctctctggttagaccagatctgagcctgggagctctctggctaactagggaacccactgcttaagcctcaataaagcttgccttgagtgcttcaagtagtgtgtgcccgtctgttgtgtgactctggtaactagagatccctcagacccttttagtcagtgtggaaaatctctagcagtggcgcccgaacagggacttgaaagcgaaagggaaaccagaggagctctctcgacgcaggactcggcttgctgaagcgcgcacggcaagaggcgaggggcggcgactggtgagtacgccaaaaattttgactagcggaggctagaaggagagagatgggtgcgagagcgtcagtattaagcgggggagaattagatcgcgatgggaaaaaattcggttaaggccagggggaaagaaaaaatataaattaaaacatatagtatgggcaagcagggagctagaacgattcgcagttaatcctggcctgttagaaacatcagaaggctgtagacaaatactgggacagctacaaccatcccttcagacaggatcagaagaacttagatcattatataatacagtagcaaccctctattgtgtgcatcaaaggatagagataaaagacaccaaggaagctttagacaagatagaggaagagcaaaacaaaagtaagaccaccgcacagcaagcggccggtgatcttcagacctggacgatatatatgagggacaattggagaagtgaattatataaatataaagtagtaaaaattgaaccattaggagtagcacccaccaaggcaaagagaagagtggtgcagagagaaaaaagagcagtgggaataggagctttgttccttgggttcttgggagcagcaggaagcactatgggcgcagcgtcaatgacgctgacggtacaggccagacaattattgtctggtatagtgcagcagcagaacaatttgctgagggctattgaggcgcaacagcatctgttgcaactcacagtctggggcatcaagcagctccaggcaagaatcctggctgtggaaagatacctaaaggatcaacagctcctggggatttggggttgctctggaaaactcatttgcaccactgctgtgccttggaatgctagttggagtaataaatctctggaacagatttggaatcacacgacctggatggagtgggacagagaaattaacaattacacaagcttaatacactccttaattgaagaatcgcaaaaccagcaagaaaagaatgaacaagaattattggaattagataaatgggcaagtttgtggaattggtttaacataacaaattggctgtggtatataaaattattcataatgatagtaggaggcttggtaggtttaagaatagtttttgctgtactttctatagtgaatagagttaggcagggatattcaccattatcgtttcagacccacctcccaaccccgaggggacccgacaggcccgaaggaatagaagaagaaggtggagagagagacagagacagatccattcgattagtgaacggatctcgacggtatcgccaaatggcagtattcatccacaattttaaaagaaaaggggggattggggggtacagtgcaggggaaagaatagtagacataatagcaacagacatacaaactaaagaattacaaaaacaaattacaaaaattcaaaattttcgggtttattacagggacagcagagatccagtttggatcgataagcttgatatcgaattcgggtaggggaggcgcttttcccaaggcagtctggagcatgcgctttagcagccccgctgggcacttggcgctacacaagtggcctctggcctcgcacacattccacatccaccggtaggcgccaaccggctccgttctttggtggccccttcgcgccaccttctactcctcccctagtcaggaagttcccccccgccccgcagctcgcgtcgtgcaggacgtgacaaatggaagtagcacgtctcactagtctcgtgcagatggacagcaccgctgagcaatggaagcgggtaggcctttggggcagcggccaatagcagctttgctccttcgctttctgggctcagaggctgggaaggggtgggtccgggggcgggctcaggggcgggctcaggggcggggcgggcgcccgaaggtcctccggaggcccggcattctgcacgcttcaaaagcgcacgtctgccgcgctgttctcctcttcctcatctccgggcctttcgacctgcagcccaaggccaccatggccttaccagtgaccgccttgctcctgccgctggccttgctgctccacgccgccaggccggagcagaagctgatcagcgaggaggacctggacatccagatgacacagactacatcctccctgtctgcctctctgggagacagagtcaccatcagttgcagggcaagtcaggacattagtaaatatttaaattggtatcagcagaaaccagatggaactgttaaactcctgatctaccatacatcaagattacactcaggagtcccatcaaggttcagtggcagtgggtctggaacagattattctctcaccattagcaacctggagcaagaagatattgccacttacttttgccaacagggtaatacgcttccgtacacgttcggaggggggaccaagctggagatcacaggtggcggtggctcgggcggtggtgggtcgggtggcggcggatctgaggtgaaactgcaggagtcaggacctggcctggtggcgccctcacagagcctgtccgtcacatgcactgtctcaggggtctcattacccgactatggtgtaagctggattcgccagcctccacgaaagggtctggagtggctgggagtaatatggggtagtgaaaccacatactataattcagctctcaaatccagactgaccatcatcaaggacaactccaagagccaagttttcttaaaaatgaacagtctgcaaactgatgacacagccatttactactgtgccaaacattattactacggtggtagctatgctatggactactggggccaaggaacctcagtcaccgtctcctcaaccacgacgccagcgccgcgaccaccaacaccggcgcccaccatcgcgtcgcagcccctgtccctgcgcccagaggcgtgctttatgtacgtggcagccgcggcatttgtacttctgtttttcgtggggtgcggtgtgcttctcagcaagaggaaacggaagcaccccaagaaaaagaggaaggtgtctagacccggagagcgcccattccagtgtcggatttgcatgcggaacttttcgagaagacacggcctggacagacatacccgtactcatacaggtgaaaaaccctttcagtgtcggatctgtatgcgaaatttctccgaccacagcagcctgaagagacatctacgtacccacaccggcagccagaagccatttcagtgtcggatctgtatgcggaacttctccgtgagacacaacctgaccagacatctacgtacgcacaccggagagaagccattccaatgccgaatatgcatgcgcaacttcagtgaccacagcaacctgagcagacacctaaaaacccacaccggttcccagaagccatttcagtgtcggatctgtatgcggaacttctcccagcgcagcagcctggtgagacatctacgtacgcacaccggagagaagccattccaatgccgaatatgcatgcgcaacttcagtgagagcggccacctgaagagacacctgcgtacgcacctgagggatgagtttcccaccatggtgtttccttctgggcagatcagccaggcctcggccttggccccggcccctccccaagtcctgccccaggctccagcccctgcccctgctccagccatggtatcagctctggcccaggccccagcccctgtcccagtcctagccccaggccctcctcaggctgtggccccacctgcccccaagcccacccaggctggggaaggaacgctgtcagaggccctgctgcagctgcagtttgatgatgaagacctgggggccttgcttggcaacagcacagacccagctgtgttcacagacctggcatccgtcgacaactccgagtttcagcagctgctgaaccagggcatacctgtggccccccacacaactgagcccatgctgatggagtaccctgaggctataactcgcctagtgacaggggcccagaggccccccgacccagctcctgctccactgggggccccggggctccccaatggcctcctttcaggagatgaagacttctcctccattgcggacatggacttctcagccctgctgagtcagatcagctccagtgggcagggaggaggtggaagcggcttcagcgtggacaccagtgccctgctggacctgttcagcccctcggtgaccgtgcccgacatgagcctgcctgaccttgacagcagcctggccagtatccaagagctcctgtctccccaggagccccccaggcctcccgaggcagagaacagcagcccggattcagggaagcagctggtgcactacacagcgcagccgctgttcctgctggaccccggctccgtggacaccgggagcaacgacctgccggtgctgtttgagctgggagagggctcctacttctccgaaggggacggcttcgccgaggaccccaccatctccctgctgacaggctcggagcctcccaaagccaaggaccccactgtctcctaagcggccgctaatcaacctctggattacaaaatttgtgaaagattgactggtattcttaactatgttgctccttttacgctatgtggatacgctgctttaatgcctttgtatcatgctattgcttcccgtatggctttcattttctcctccttgtataaatcctggttgctgtctctttatgaggagttgtggcccgttgtcaggcaacgtggcgtggtgtgcactgtgtttgctgacgcaacccccactggttggggcattgccaccacctgtcagctcctttccgggactttcgctttccccctccctattgccacggcggaactcatcgccgcctgccttgcccgctgctggacaggggctcggctgttgggcactgacaattccgtggtgttgtcggggaaatcatcgtcctttccttggctgctcgcctgtgttgccacctggattctgcgcgggacgtccttctgctacgtcccttcggccctcaatccagcggaccttccttcccgcggcctgctgccggctctgcggcctcttccgcgtcttcgccttcgccctcagacgagtcggatctccctttgggccgcctccccgcatgcgatcgcttagccactttttaaaagaaaaggggggactggaagggctaattcactcccaacgaagacaagatctgctttttgcttgtactgggtctctctggttagaccagatctgagcctgggagctctctggctaactagggaacccactgcttaagcctcaataaagcttgccttgagtgcttcaagtagtgtgtgcccgtctgttgtgtgactctggtaactagagatccctcagacccttttagtcagtgtggaaaatctctagcagcatctagaattaattccgtgtattctatagtgtcacctaaatcgtatgtgtatgatacataaggttatgtattaattgtagccgcgttctaacgacaatatgtacaagcctaattgtgtagcatctggcttactgaagcagaccctatcatctctctcgtaaactgccgtcagagtcggtttggttggacgaaccttctgagtttctggtaacgccgtcccgcacccggaaatggtcagcgaaccaatcagcagggtcatcgctagccagatcctctacgccggacgcatcgtggccggcatcaccggcgccacaggtgcggttgctggcgcctatatcgccgacatcaccgatggggaagatcgggctcgccacttcgggctcatgagcgcttgtttcggcgtgggtatggtggcaggccccgtggccgggggactgttgggcgccatctccttgcatgcaccattccttgcggcggcggtgctcaacggcctcaacctactactgggctgcttcctaatgcaggagtcgcataagggagagcgtcgaatggtgcactctcagtacaatctgctctgatgccgcatagttaagccagccccgacacccgccaacacccgctgacgcgccctgacgggcttgtctgctcccggcatccgcttacagacaagctgtgaccgtctccgggagctgcatgtgtcagaggttttcaccgtcatcaccgaaacgcgcgagacgaaagggcctcgtgatacgcctatttttataggttaatgtcatgataataatggtttcttagacgtcaggtggcacttttcggggaaatgtgcgcggaacccctatttgtttatttttctaaatacattcaaatatgtatccgctcatgagacaataaccctgataaatgcttcaataatattgaaaaaggaagagtatgagtattcaacatttccgtgtcgcccttattcccttttttgcggcattttgccttcctgtttttgctcacccagaaacgctggtgaaagtaaaagatgctgaagatcagttgggtgcacgagtgggttacatcgaactggatctcaacagcggtaagatccttgagagttttcgccccgaagaacgttttccaatgatgagcacttttaaagttctgctatgtggcgcggtattatcccgtattgacgccgggcaagagcaactcggtcgccgcatacactattctcagaatgacttggttgagtactcaccagtcacagaaaagcatcttacggatggcatgacagtaagagaattatgcagtgctgccataaccatgagtgataacactgcggccaacttacttctgacaacgatcggaggaccgaaggagctaaccgcttttttgcacaacatgggggatcatgtaactcgccttgatcgttgggaaccggagctgaatgaagccataccaaacgacgagcgtgacaccacgatgcctgtagcaatggcaacaacgttgcgcaaactattaactggcgaactacttactctagcttcccggcaacaattaatagactggatggaggcggataaagttgcaggaccacttctgcgctcggcccttccggctggctggtttattgctgataaatctggagccggtgagcgtgggtctcgcggtatcattgcagcactggggccagatggtaagccctcccgtatcgtagttatctacacgacggggagtcaggcaactatggatgaacgaaatagacagatcgctgagataggtgcctcactgattaagcattggtaactgtcagaccaagtttactcatatatactttagattgatttaaaacttcatttttaatttaaaaggatctaggtgaagatcctttttgataatctcatgaccaaaatcccttaacgtgagttttcgttccactgagcgtcagaccccgtagaaaagatcaaaggatcttcttgagatcctttttttctgcgcgtaatctgctgcttgcaaacaaaaaaaccaccgctaccagcggtggtttgtttgccggatcaagagctaccaactctttttccgaaggtaactggcttcagcagagcgcagataccaaatactgttcttctagtgtagccgtagttaggccaccacttcaagaactctgtagcaccgcctacatacctcgctctgctaatcctgttaccagtggctgctgccagtggcgataagtcgtgtcttaccgggttggactcaagacgatagttaccggataaggcgcagcggtcgggctgaacggggggttcgtgcacacagcccagcttggagcgaacgacctacaccgaactgagatacctacagcgtgagctatgagaaagcgccacgcttcccgaagggagaaaggcggacaggtatccggtaagcggcagggtcggaacaggagagcgcacgagggagcttccagggggaaacgcctggtatctttatagtcctgtcgggtttcgccacctctgacttgagcgtcgatttttgtgatgctcgtcaggggggcggagcctatggaaaaacgccagcaacgcggcctttttacggttcctggccttttgctggccttttgctcacatgttctttcctgcgttatcccctgattctgtggataaccgtattaccgcctttgagtgagctgataccgctcgccgcagccgaacgaccgagcgcagcgagtcagtgagcgaggaagcggaagagcgcccaatacgcaaaccgcctctccccgcgcgttggccgattcattaatgcagctgtggaatgtgtgtcagttagggtgtggaaagtccccaggctccccagcaggcagaagtatgcaaagcatgcatctcaattagtcagcaaccaggtgtggaaagtccccaggctccccagcaggcagaagtatgcaaagcatgcatctcaattagtcagcaaccatagtcccgcccctaactccgcccatcccgcccctaactccgcccagttccgcccattctccgccccatcgctgactaattttttttatttatgcagaggccgaggccgcctcggcctctgagctattccagaagtagtgaggaggcttttttggaggcctaggcttttgcaaaaagcttggacacaagacaggcttgcgagatatgtttgagaataccactttatcccgcgtcagggagaggcagtgcgtaaaaagacgcggactcatgtgaaatactggtttttagtgcgccagatctctataatctcgcgcaacctattttcccctcgaacactttttaagccgtagataaacaggctgggacacttcacatgagcgaaaaatacatcgtcacctgggacatgttgcagatccatgcacgtaaactcgcaagccgactgatgccttctgaacaatggaaaggcattattgccgtaagccgtggcggtctgtaccgggtgcgttactggcgcgtgaactgggtattcgtcatgtcgataccgtttgtatttccagctacgatcacgacaaccagcgcgagcttaaagtgctgaaacgcgcagaaggcgatggcgaaggcttcatcgttattgatgacctggtggataccggtggtactgcggttgcgattcgtgaaatgtatccaaaagcgcactttgtcaccatcttcgcaaaaccggctggtcgtccgctggttgatgactatgttgttgatatcccgcaagatacctggattgaacagccgtgggatatgggcgtcgtattcgtcccgccaatctccggtcgctaatcttttcaacgcctggcactgccgggcgttgttctttttaacttcaggcgggttacaatagtttccagtaagtattctggaggctgcatccatgacacaggcaaacctgagcgaaaccctgttcaaaccccgctttaaacatcctgaaacctcgacgctagtccgccgctttaatcacggcgcacaaccgcctgtgcagtcggcccttgatggtaaaaccatccctcactggtatcgcatgattaaccgtctgatgtggatctggcgcggcattgacccacgcgaaatcctcgacgtccaggcacgtattgtgatgagcgatgccgaacgtaccgacgatgatttatacgatacggtgattggctaccgtggcggcaactggatttatgagtgggccccggatctttgtgaaggaaccttacttctgtggtgtgacataattggacaaactacctacagagatttaaagctctaaggtaaatataaaatttttaagtgtataatgtgttaaactactgattctaattgtttgtgtattttagattccaacctatggaactgatgaatgggagcagtggtggaatgcctttaatgaggaaaacctgttttgctcagaagaaatgccatctagtgatgatgaggctactgctgactctcaacattctactcctccaaaaaagaagagaaaggtagaagaccccaaggactttccttcagaattgctaagttttttgagtcatgctgtgtttagtaatagaactcttgcttgctttgctatttacaccacaaaggaaaaagctgcactgctatacaagaaaattatggaaaaatattctgtaacctttataagtaggcataacagttataatcataacatactgttttttcttactccacacaggcatagagtgtctgctattaataactatgctcaaaaattgtgtacctttagctttttaatttgtaaaggggttaataaggaatatttgatgtatagtgccttgactagagatcataatcagccataccacatttgtagaggttttacttgctttaaaaaacctcccacacctccccctgaacctgaaacataaaatgaatgcaattgttgttgttaacttgtttattgcagcttataatggttacaaataaagcaatagcatcacaaatttcacaaataaagcatttttttcactgcattctagttgtggtttgtccaaactcatcaatgtatcttatcatgtctggatcaactggataactcaagctaaccaaaatcatcccaaacttcccaccccataccctattaccactgccaattacctagtggtttcatttactctaaacctgtgattcctctgaattattttcattttaaagaaattgtatttgttaaatatgtactacaaacttagtagt

SEQ ID NO: 177 - DNA, 11121 bp, Artificial sequence
  Synthetic construct
tggaagggctaattcactcccaaagaagacaagatatccttgatctgtggatctaccacacacaaggctacttccctgattagcagaactacacaccagggccaggggtcagatatccactgacctttggatggtgctacaagctagtaccagttgagccagataaggtagaagaggccaataaaggagagaacaccagcttgttacaccctgtgagcctgcatgggatggatgacccggagagagaagtgttagagtggaggtttgacagccgcctagcatttcatcacgtggcccgagagctgcatccggagtacttcaagaactgctgatatcgagcttgctacaagggactttccgctggggactttccagggaggcgtggcctgggcgggactggggagtggcgagccctcagatcctgcatataagcagctgctttttgcctgtactgggtctctctggttagaccagatctgagcctgggagctctctggctaactagggaacccactgcttaagcctcaataaagcttgccttgagtgcttcaagtagtgtgtgcccgtctgttgtgtgactctggtaactagagatccctcagacccttttagtcagtgtggaaaatctctagcagtggcgcccgaacagggacttgaaagcgaaagggaaaccagaggagctctctcgacgcaggactcggcttgctgaagcgcgcacggcaagaggcgaggggcggcgactggtgagtacgccaaaaattttgactagcggaggctagaaggagagagatgggtgcgagagcgtcagtattaagcgggggagaattagatcgcgatgggaaaaaattcggttaaggccagggggaaagaaaaaatataaattaaaacatatagtatgggcaagcagggagctagaacgattcgcagttaatcctggcctgttagaaacatcagaaggctgtagacaaatactgggacagctacaaccatcccttcagacaggatcagaagaacttagatcattatataatacagtagcaaccctctattgtgtgcatcaaaggatagagataaaagacaccaaggaagctttagacaagatagaggaagagcaaaacaaaagtaagaccaccgcacagcaagcggccggtgatcttcagacctggacgatatatatgagggacaattggagaagtgaattatataaatataaagtagtaaaaattgaaccattaggagtagcacccaccaaggcaaagagaagagtggtgcagagagaaaaaagagcagtgggaataggagctttgttccttgggttcttgggagcagcaggaagcactatgggcgcagcgtcaatgacgctgacggtacaggccagacaattattgtctggtatagtgcagcagcagaacaatttgctgagggctattgaggcgcaacagcatctgttgcaactcacagtctggggcatcaagcagctccaggcaagaatcctggctgtggaaagatacctaaaggatcaacagctcctggggatttggggttgctctggaaaactcatttgcaccactgctgtgccttggaatgctagttggagtaataaatctctggaacagatttggaatcacacgacctggatggagtgggacagagaaattaacaattacacaagcttaatacactccttaattgaagaatcgcaaaaccagcaagaaaagaatgaacaagaattattggaattagataaatgggcaagtttgtggaattggtttaacataacaaattggctgtggtatataaaattattcataatgatagtaggaggcttggtaggtttaagaatagtttttgctgtactttctatagtgaatagagttaggcagggatattcaccattatcgtttcagacccacctcccaaccccgaggggacccgacaggcccgaaggaatagaagaagaaggtggagagagagacagagacagatccattcgattagtgaacggatctcgacggtatcgccaaatggcagtattcatccacaattttaaaagaaaaggggggattggggggtacagtgcaggggaaagaatagtagacataatagcaacagacatacaaactaaagaattacaaaaacaaattacaaaaattcaaaattttcgggtttattacagggacagcagagatccagtttggatcgataagcttgatatcgaattcgggtaggggaggcgcttttcccaaggcagtctggagcatgcgctttagcagccccgctgggcacttggcgctacacaagtggcctctggcctcgcacacattccacatccaccggtaggcgccaaccggctccgttctttggtggccccttcgcgccaccttctactcctcccctagtcaggaagttcccccccgccccgcagctcgcgtcgtgcaggacgtgacaaatggaagtagcacgtctcactagtctcgtgcagatggacagcaccgctgagcaatggaagcgggtaggcctttggggcagcggccaatagcagctttgctccttcgctttctgggctcagaggctgggaaggggtgggtccgggggcgggctcaggggcgggctcaggggcggggcgggcgcccgaaggtcctccggaggcccggcattctgcacgcttcaaaagcgcacgtctgccgcgctgttctcctcttcctcatctccgggcctttcgacctgcagcccaaggccaccatggccttaccagtgaccgccttgctcctgccgctggccttgctgctccacgccgccaggccggagcagaagctgatcagcgaggaggacctggacatccagatgacacagactacatcctccctgtctgcctctctgggagacagagtcaccatcagttgcagggcaagtcaggacattagtaaatatttaaattggtatcagcagaaaccagatggaactgttaaactcctgatctaccatacatcaagattacactcaggagtcccatcaaggttcagtggcagtgggtctggaacagattattctctcaccattagcaacctggagcaagaagatattgccacttacttttgccaacagggtaatacgcttccgtacacgttcggaggggggaccaagctggagatcacaggtggcggtggctcgggcggtggtgggtcgggtggcggcggatctgaggtgaaactgcaggagtcaggacctggcctggtggcgccctcacagagcctgtccgtcacatgcactgtctcaggggtctcattacccgactatggtgtaagctggattcgccagcctccacgaaagggtctggagtggctgggagtaatatggggtagtgaaaccacatactataattcagctctcaaatccagactgaccatcatcaaggacaactccaagagccaagttttcttaaaaatgaacagtctgcaaactgatgacacagccatttactactgtgccaaacattattactacggtggtagctatgctatggactactggggccaaggaacctcagtcaccgtctcctcaaccacgacgccagcgccgcgaccaccaacaccggcgcccaccatcgcgtcgcagcccctgtccctgcgcccagaggcgtgctttatgtacgtggcagccgcggcatttgtacttctgtttttcgtggggtgcggtgtgcttctcagcaagaggaaacggaagcaccccaagaaaaagaggaaggtgtctagacccggagagcgcccattccagtgtcggatttgcatgcggaacttttcgagaagacacggcctggacagacatacccgtactcatacaggtgaaaaaccctttcagtgtcggatctgtatgcgaaatttctccgaccacagcagcctgaagagacatctacgtacccacaccggcagccagaagccatttcagtgtcggatctgtatgcggaacttctccgtgagacacaacctgaccagacatctacgtacgcacaccggagagaagccattccaatgccgaatatgcatgcgcaacttcagtgaccacagcaacctgagcagacacctaaaaacccacaccggttcccagaagccatttcagtgtcggatctgtatgcggaacttctcccagcgcagcagcctggtgagacatctacgtacgcacaccggagagaagccattccaatgccgaatatgcatgcgcaacttcagtgagagcggccacctgaagagacacctgcgtacgcacctgagggatgagtttcccaccatggtgtttccttctgggcagatcagccaggcctcggccttggccccggcccctccccaagtcctgccccaggctccagcccctgcccctgctccagccatggtatcagctctggcccaggccccagcccctgtcccagtcctagccccaggccctcctcaggctgtggccccacctgcccccaagcccacccaggctggggaaggaacgctgtcagaggccctgctgcagctgcagtttgatgatgaagacctgggggccttgcttggcaacagcacagacccagctgtgttcacagacctggcatccgtcgacaactccgagtttcagcagctgctgaaccagggcatacctgtggccccccacacaactgagcccatgctgatggagtaccctgaggctataactcgcctagtgacaggggcccagaggccccccgacccagctcctgctccactgggggccccggggctccccaatggcctcctttcaggagatgaagacttctcctccattgcggacatggacttctcagccctgctgagtcagatcagctccagtgggcagggaggaggtggaagcgaccaaagcacctttgacattttgcaggatttggagttttcttctgggtccccaggtaaagagacgaatgagagtccttggagatcagacctgttgatagatgaaaactgtttgctttctcctctggcgggagaagacgattcattccttttggaaggaaactcgaatgaggactaagcggccgctaatcaacctctggattacaaaatttgtgaaagattgactggtattcttaactatgttgctccttttacgctatgtggatacgctgctttaatgcctttgtatcatgctattgcttcccgtatggctttcattttctcctccttgtataaatcctggttgctgtctctttatgaggagttgtggcccgttgtcaggcaacgtggcgtggtgtgcactgtgtttgctgacgcaacccccactggttggggcattgccaccacctgtcagctcctttccgggactttcgctttccccctccctattgccacggcggaactcatcgccgcctgccttgcccgctgctggacaggggctcggctgttgggcactgacaattccgtggtgttgtcggggaaatcatcgtcctttccttggctgctcgcctgtgttgccacctggattctgcgcgggacgtccttctgctacgtcccttcggccctcaatccagcggaccttccttcccgcggcctgctgccggctctgcggcctcttccgcgtcttcgccttcgccctcagacgagtcggatctccctttgggccgcctccccgcatgcgatcgcttagccactttttaaaagaaaaggggggactggaagggctaattcactcccaacgaagacaagatctgctttttgcttgtactgggtctctctggttagaccagatctgagcctgggagctctctggctaactagggaacccactgcttaagcctcaataaagcttgccttgagtgcttcaagtagtgtgtgcccgtctgttgtgtgactctggtaactagagatccctcagacccttttagtcagtgtggaaaatctctagcagcatctagaattaattccgtgtattctatagtgtcacctaaatcgtatgtgtatgatacataaggttatgtattaattgtagccgcgttctaacgacaatatgtacaagcctaattgtgtagcatctggcttactgaagcagaccctatcatctctctcgtaaactgccgtcagagtcggtttggttggacgaaccttctgagtttctggtaacgccgtcccgcacccggaaatggtcagcgaaccaatcagcagggtcatcgctagccagatcctctacgccggacgcatcgtggccggcatcaccggcgccacaggtgcggttgctggcgcctatatcgccgacatcaccgatggggaagatcgggctcgccacttcgggctcatgagcgcttgtttcggcgtgggtatggtggcaggccccgtggccgggggactgttgggcgccatctccttgcatgcaccattccttgcggcggcggtgctcaacggcctcaacctactactgggctgcttcctaatgcaggagtcgcataagggagagcgtcgaatggtgcactctcagtacaatctgctctgatgccgcatagttaagccagccccgacacccgccaacacccgctgacgcgccctgacgggcttgtctgctcccggcatccgcttacagacaagctgtgaccgtctccgggagctgcatgtgtcagaggttttcaccgtcatcaccgaaacgcgcgagacgaaagggcctcgtgatacgcctatttttataggttaatgtcatgataataatggtttcttagacgtcaggtggcacttttcggggaaatgtgcgcggaacccctatttgtttatttttctaaatacattcaaatatgtatccgctcatgagacaataaccctgataaatgcttcaataatattgaaaaaggaagagtatgagtattcaacatttccgtgtcgcccttattcccttttttgcggcattttgccttcctgtttttgctcacccagaaacgctggtgaaagtaaaagatgctgaagatcagttgggtgcacgagtgggttacatcgaactggatctcaacagcggtaagatccttgagagttttcgccccgaagaacgttttccaatgatgagcacttttaaagttctgctatgtggcgcggtattatcccgtattgacgccgggcaagagcaactcggtcgccgcatacactattctcagaatgacttggttgagtactcaccagtcacagaaaagcatcttacggatggcatgacagtaagagaattatgcagtgctgccataaccatgagtgataacactgcggccaacttacttctgacaacgatcggaggaccgaaggagctaaccgcttttttgcacaacatgggggatcatgtaactcgccttgatcgttgggaaccggagctgaatgaagccataccaaacgacgagcgtgacaccacgatgcctgtagcaatggcaacaacgttgcgcaaactattaactggcgaactacttactctagcttcccggcaacaattaatagactggatggaggcggataaagttgcaggaccacttctgcgctcggcccttccggctggctggtttattgctgataaatctggagccggtgagcgtgggtctcgcggtatcattgcagcactggggccagatggtaagccctcccgtatcgtagttatctacacgacggggagtcaggcaactatggatgaacgaaatagacagatcgctgagataggtgcctcactgattaagcattggtaactgtcagaccaagtttactcatatatactttagattgatttaaaacttcatttttaatttaaaaggatctaggtgaagatcctttttgataatctcatgaccaaaatcccttaacgtgagttttcgttccactgagcgtcagaccccgtagaaaagatcaaaggatcttcttgagatcctttttttctgcgcgtaatctgctgcttgcaaacaaaaaaaccaccgctaccagcggtggtttgtttgccggatcaagagctaccaactctttttccgaaggtaactggcttcagcagagcgcagataccaaatactgttcttctagtgtagccgtagttaggccaccacttcaagaactctgtagcaccgcctacatacctcgctctgctaatcctgttaccagtggctgctgccagtggcgataagtcgtgtcttaccgggttggactcaagacgatagttaccggataaggcgcagcggtcgggctgaacggggggttcgtgcacacagcccagcttggagcgaacgacctacaccgaactgagatacctacagcgtgagctatgagaaagcgccacgcttcccgaagggagaaaggcggacaggtatccggtaagcggcagggtcggaacaggagagcgcacgagggagcttccagggggaaacgcctggtatctttatagtcctgtcgggtttcgccacctctgacttgagcgtcgatttttgtgatgctcgtcaggggggcggagcctatggaaaaacgccagcaacgcggcctttttacggttcctggccttttgctggccttttgctcacatgttctttcctgcgttatcccctgattctgtggataaccgtattaccgcctttgagtgagctgataccgctcgccgcagccgaacgaccgagcgcagcgagtcagtgagcgaggaagcggaagagcgcccaatacgcaaaccgcctctccccgcgcgttggccgattcattaatgcagctgtggaatgtgtgtcagttagggtgtggaaagtccccaggctccccagcaggcagaagtatgcaaagcatgcatctcaattagtcagcaaccaggtgtggaaagtccccaggctccccagcaggcagaagtatgcaaagcatgcatctcaattagtcagcaaccatagtcccgcccctaactccgcccatcccgcccctaactccgcccagttccgcccattctccgccccatcgctgactaattttttttatttatgcagaggccgaggccgcctcggcctctgagctattccagaagtagtgaggaggcttttttggaggcctaggcttttgcaaaaagcttggacacaagacaggcttgcgagatatgtttgagaataccactttatcccgcgtcagggagaggcagtgcgtaaaaagacgcggactcatgtgaaatactggtttttagtgcgccagatctctataatctcgcgcaacctattttcccctcgaacactttttaagccgtagataaacaggctgggacacttcacatgagcgaaaaatacatcgtcacctgggacatgttgcagatccatgcacgtaaactcgcaagccgactgatgccttctgaacaatggaaaggcattattgccgtaagccgtggcggtctgtaccgggtgcgttactggcgcgtgaactgggtattcgtcatgtcgataccgtttgtatttccagctacgatcacgacaaccagcgcgagcttaaagtgctgaaacgcgcagaaggcgatggcgaaggcttcatcgttattgatgacctggtggataccggtggtactgcggttgcgattcgtgaaatgtatccaaaagcgcactttgtcaccatcttcgcaaaaccggctggtcgtccgctggttgatgactatgttgttgatatcccgcaagatacctggattgaacagccgtgggatatgggcgtcgtattcgtcccgccaatctccggtcgctaatcttttcaacgcctggcactgccgggcgttgttctttttaacttcaggcgggttacaatagtttccagtaagtattctggaggctgcatccatgacacaggcaaacctgagcgaaaccctgttcaaaccccgctttaaacatcctgaaacctcgacgctagtccgccgctttaatcacggcgcacaaccgcctgtgcagtcggcccttgatggtaaaaccatccctcactggtatcgcatgattaaccgtctgatgtggatctggcgcggcattgacccacgcgaaatcctcgacgtccaggcacgtattgtgatgagcgatgccgaacgtaccgacgatgatttatacgatacggtgattggctaccgtggcggcaactggatttatgagtgggccccggatctttgtgaaggaaccttacttctgtggtgtgacataattggacaaactacctacagagatttaaagctctaaggtaaatataaaatttttaagtgtataatgtgttaaactactgattctaattgtttgtgtattttagattccaacctatggaactgatgaatgggagcagtggtggaatgcctttaatgaggaaaacctgttttgctcagaagaaatgccatctagtgatgatgaggctactgctgactctcaacattctactcctccaaaaaagaagagaaaggtagaagaccccaaggactttccttcagaattgctaagttttttgagtcatgctgtgtttagtaatagaactcttgcttgctttgctatttacaccacaaaggaaaaagctgcactgctatacaagaaaattatggaaaaatattctgtaacctttataagtaggcataacagttataatcataacatactgttttttcttactccacacaggcatagagtgtctgctattaataactatgctcaaaaattgtgtacctttagctttttaatttgtaaaggggttaataaggaatatttgatgtatagtgccttgactagagatcataatcagccataccacatttgtagaggttttacttgctttaaaaaacctcccacacctccccctgaacctgaaacataaaatgaatgcaattgttgttgttaacttgtttattgcagcttataatggttacaaataaagcaatagcatcacaaatttcacaaataaagcatttttttcactgcattctagttgtggtttgtccaaactcatcaatgtatcttatcatgtctggatcaactggataactcaagctaaccaaaatcatcccaaacttcccaccccataccctattaccactgccaattacctagtggtttcatttactctaaacctgtgattcctctgaattattttcattttaaagaaattgtatttgttaaatatgtactacaaacttagtagt

SEQ ID NO: 178 - DNA, 11026 bp, Artificial sequence
  Synthetic construct
tggaagggctaattcactcccaaagaagacaagatatccttgatctgtggatctaccacacacaaggctacttccctgattagcagaactacacaccagggccaggggtcagatatccactgacctttggatggtgctacaagctagtaccagttgagccagataaggtagaagaggccaataaaggagagaacaccagcttgttacaccctgtgagcctgcatgggatggatgacccggagagagaagtgttagagtggaggtttgacagccgcctagcatttcatcacgtggcccgagagctgcatccggagtacttcaagaactgctgatatcgagcttgctacaagggactttccgctggggactttccagggaggcgtggcctgggcgggactggggagtggcgagccctcagatcctgcatataagcagctgctttttgcctgtactgggtctctctggttagaccagatctgagcctgggagctctctggctaactagggaacccactgcttaagcctcaataaagcttgccttgagtgcttcaagtagtgtgtgcccgtctgttgtgtgactctggtaactagagatccctcagacccttttagtcagtgtggaaaatctctagcagtggcgcccgaacagggacttgaaagcgaaagggaaaccagaggagctctctcgacgcaggactcggcttgctgaagcgcgcacggcaagaggcgaggggcggcgactggtgagtacgccaaaaattttgactagcggaggctagaaggagagagatgggtgcgagagcgtcagtattaagcgggggagaattagatcgcgatgggaaaaaattcggttaaggccagggggaaagaaaaaatataaattaaaacatatagtatgggcaagcagggagctagaacgattcgcagttaatcctggcctgttagaaacatcagaaggctgtagacaaatactgggacagctacaaccatcccttcagacaggatcagaagaacttagatcattatataatacagtagcaaccctctattgtgtgcatcaaaggatagagataaaagacaccaaggaagctttagacaagatagaggaagagcaaaacaaaagtaagaccaccgcacagcaagcggccggtgatcttcagacctggacgatatatatgagggacaattggagaagtgaattatataaatataaagtagtaaaaattgaaccattaggagtagcacccaccaaggcaaagagaagagtggtgcagagagaaaaaagagcagtgggaataggagctttgttccttgggttcttgggagcagcaggaagcactatgggcgcagcgtcaatgacgctgacggtacaggccagacaattattgtctggtatagtgcagcagcagaacaatttgctgagggctattgaggcgcaacagcatctgttgcaactcacagtctggggcatcaagcagctccaggcaagaatcctggctgtggaaagatacctaaaggatcaacagctcctggggatttggggttgctctggaaaactcatttgcaccactgctgtgccttggaatgctagttggagtaataaatctctggaacagatttggaatcacacgacctggatggagtgggacagagaaattaacaattacacaagcttaatacactccttaattgaagaatcgcaaaaccagcaagaaaagaatgaacaagaattattggaattagataaatgggcaagtttgtggaattggtttaacataacaaattggctgtggtatataaaattattcataatgatagtaggaggcttggtaggtttaagaatagtttttgctgtactttctatagtgaatagagttaggcagggatattcaccattatcgtttcagacccacctcccaaccccgaggggacccgacaggcccgaaggaatagaagaagaaggtggagagagagacagagacagatccattcgattagtgaacggatctcgacggtcgccaaatggcagtattcatccacaattttaaaagaaaaggggggattggggggtacagtgcaggggaaagaatagtagacataatagcaacagacatacaaactaaagaattacaaaaacaaattacaaaaattcaaaattttcgggtttattacagggacagcagagatccagtttggatcgataagcttgatatcgaattgggtaggggaggcgcttttcccaaggcagtctggagcatgcgctttagcagccccgctgggcacttggcgctacacaagtggcctctggcctcgcacacattccacatccaccggtaggcgccaaccggctccgttctttggtggccccttcgcgccaccttctactcctcccctagtcaggaagttcccccccgccccgcagctcgcgtcgtgcaggacgtgacaaatggaagtagcacgtctcactagtctcgtgcagatggacagcaccgctgagcaatggaagcgggtaggcctttggggcagcggccaatagcagctttgctccttcgctttctgggctcagaggctgggaaggggtgggtccgggggcgggctcaggggcgggctcaggggcggggcgggcgcccgaaggtcctccggaggcccggcattctgcacgcttcaaaagcgcacgtctgccgcgctgttctcctcttcctcatctccgggcctttcgaattctcacgcgtcaagtggagcaaggcaggtggacagtggatcatggcgttgcctgtcacggcactgctccttccccttgcacttcttcttcatgcagctcgccccgagcagaaattgatctccgaagaagaccttcaggtccaactgcagcaatcaggtggaggacttgtgaaaccaggagggagtctgaggcttagctgcgcagcgagtgggtttactttctctagttacgccatgcactgggtgcgccaagcccccgggaaaggactggagtgggtcgctgttatttcatatgacgggtcaaataaatactacgccgattcagtaaagggtcgatttactatatctagggacaacagtaagaacacactttatctgcagatggatagcctgcgggcggaggacactgcagtctactattgcgcgaaggaaggagacagctcacgctggagctacgacctctggggaagggggactctcgtaacggtgtcatccggcggtggcggcagcggtggtggtggatcagggggaggggggtctcagtcagcactcacccaacccgcatccgtgtctggtagtccgggccagagtattactatctcctgtactgggacatcctccgacgttgggggctataactacgtcagctggtatcaacagcaccctggtaaggcacccaaggtaatgatctatgatgtgacaaacagacccagcggtgtttctaaccgatttagcggttcaaaatcaggtaacaccgcaagccttaccatatctggtctccaggctgaagacgaagccgactattactgcagcagctataccatagcctctacactggttgtcttcggaggaggcactaagctgactgtgctaaccacgacgccagcgccgcgaccaccaacaccggcgcccaccatcgcgtcgcagcccctgtccctgcgcccagaggcgtgctttatgtacgtggcagccgcggcatttgtacttctgtttttcgtggggtgcggtgtgcttctcagcaagaggaaacggaagcaccccaagaaaaagaggaaggtgtctagaccaggcgaacgaccgtttcaatgccggatatgtatgaggaacttctcccagcagaccaatctcacgcggcacacccgaacacatacaggagaaaagccattccaatgtcgaatttgtatgcgcaatttttcacagaaggctaacctcggcgttcacctccgcacacatactggttcacagaagccctttcagtgcaggatttgtatgcgcaactttagcgatcactcatctctgaaacgccacactagaacgcatacaggtgagaagcctttccagtgtcgcatctgtatgcggaacttcagccgagcggatatgcttagacgccatttgcgaactcacaccggttctcaaaaaccttttcagtgccgaatttgtatgcgcaacttcagcgagaaacagaacctggcacgccacacgcgcacgcacaccggggaaaaaccgtttcaatgtcgaatctgcatgcgcaattttagcgacccctctaatcttaggaggcatctgcgcacacacttgcgggatgagtttcccaccatggtgtttccttctgggcagatcagccaggcctcggccttggccccggcccctccccaagtcctgccccaggctccagcccctgcccctgctccagccatggtatcagctctggcccaggccccagcccctgtcccagtcctagccccaggccctcctcaggctgtggccccacctgcccccaagcccacccaggctggggaaggaacgctgtcagaggccctgctgcagctgcagtttgatgatgaagacctgggggccttgcttggcaacagcacagacccagctgtgttcacagacctggcatccgtcgacaactccgagtttcagcagctgctgaaccagggcatacctgtggccccccacacaactgagcccatgctgatggagtaccctgaggctataactcgcctagtgacaggggcccagaggccccccgacccagctcctgctccactgggggccccggggctccccaatggcctcctttcaggagatgaagacttctcctccattgcggacatggacttctcagccctgctgagtcagatcagctcctaagcggccgctaatcaacctctggattacaaaatttgtgaaagattgactggtattcttaactatgttgctccttttacgctatgtggatacgctgctttaatgcctttgtatcatgctattgcttcccgtatggctttcattttctcctccttgtataaatcctggttgctgtctctttatgaggagttgtggcccgttgtcaggcaacgtggcgtggtgtgcactgtgtttgctgacgcaacccccactggttggggcattgccaccacctgtcagctcctttccgggactttcgctttccccctccctattgccacggcggaactcatcgccgcctgccttgcccgctgctggacaggggctcggctgttgggcactgacaattccgtggtgttgtcggggaaatcatcgtcctttccttggctgctcgcctgtgttgccacctggattctgcgcgggacgtccttctgctacgtcccttcggccctcaatccagcggaccttccttcccgcggcctgctgccggctctgcggcctcttccgcgtcttcgccttcgccctcagacgagtcggatctccctttgggccgcctccccgcatcgataccgtcgaccgcgagggaattaattcgagctcggtacctttaagaccaatgacttacaaggcagctgtagatcttagccactttttaaaagaaaaggggggactggaagggctaattcactcccaacgaagacaagatctgctttttgcttgtactgggtctctctggttagaccagatctgagcctgggagctctctggctaactagggaacccactgcttaagcctcaataaagcttgccttgagtgcttcaagtagtgtgtgcccgtctgttgtgtgactctggtaactagagatccctcagacccttttagtcagtgtggaaaatctctagcagcatctagaattaattccgtgtattctatagtgtcacctaaatcgtatgtgtatgatacataaggttatgtattaattgtagccgcgttctaacgacaatatgtacaagcctaattgtgtagcatctggcttactgaagcagaccctatcatctctctcgtaaactgccgtcagagtcggtttggttggacgaaccttctgagtttctggtaacgccgtcccgcacccggaaatggtcagcgaaccaatcagcagggtcatcgctagccagatcctctacgccggacgcatcgtggccggcatcaccggcgccacaggtgcggttgctggcgcctatatcgccgacatcaccgatggggaagatcgggctcgccacttcgggctcatgagcgcttgtttcggcgtgggtatggtggcaggccccgtggccgggggactgttgggcgccatctccttgcatgcaccattccttgcggcggcggtgctcaacggcctcaacctactactgggctgcttcctaatgcaggagtcgcataagggagagcgtcgaatggtgcactctcagtacaatctagctctgatgccgcatagttaagccagccccgacacccgccaacacccgctgacgcgccctgacgggcttgtctgctcccggcatccgcttacagacaagctgtgaccgtctccgggagctgcatgtgtcagaggttttcaccgtcatcaccgaaacgcgcgagacgaaagggcctcgtgatacgcctatttttataggttaatgtcatgataataatggtttcttagacgtcaggtggcacttttcggggaaatgtgcgcggaacccctatttgtttatttttctaaatacattcaaatatgtatccgctcatgagacaataaccctgataaatgcttcaataatattgaaaaaggaagagtatgagtattcaacatttccgtgtcgcccttattcccttttttgcggcattttgccttcctgtttttgctcacccagaaacgctggtgaaagtaaaagatgctgaagatcagttgggtgcacgagtgggttacatcgaactggatctcaacagcggtaagatccttgagagttttcgccccgaagaacgttttccaatgatgagcacttttaaagttctgctatgtggcgcggtattatcccgtattgacgccgggcaagagcaactcggtcgccgcatacactattctcagaatgacttggttgagtactcaccagtcacagaaaagcatcttacggatggcatgacagtaagagaattatgcagtgctgccataaccatgagtgataacactgcggccaacttacttctgacaacgatcggaggaccgaaggagctaaccgcttttttgcacaacatgggggatcatgtaactcgccttgatcgttgggaaccggagctgaatgaagccataccaaacgacgagcgtgacaccacgatgcctgtagcaatggcaacaacgttgcgcaaactattaactggcgaactacttactctagcttcccggcaacaattaatagactggatggaggcggataaagttgcaggaccacttctgcgctcggcccttccggctggctggtttattgctgataaatctggagccggtgagcgtgggtctcgcggtatcattgcagcactggggccagatggtaagccctcccgtatcgtagttatctacacgacggggagtcaggcaactatggatgaacgaaatagacagatcgctgagataggtgcctcactgattaagcattggtaactgtcagaccaagtttactcatatatactttagattgatttaaaacttcatttttaatttaaaaggatctaggtgaagatcctttttgataatctcatgaccaaaatcccttaacgtgagttttcgttccactgagcgtcagaccccgtagaaaagatcaaaggatcttcttgagatcctttttttctgcgcgtaatctgctgcttgcaaacaaaaaaaccaccgctaccagcggtggtttgtttgccggatcaagagctaccaactctttttccgaaggtaactggcttcagcagagcgcagataccaaatactgtccttctagtgtagccgtagttaggccaccacttcaagaactctgtagcaccgcctacatacctcgctctgctaatcctgttaccagtggctgctgccagtggcgataagtcgtgtcttaccgggttggactcaagacgatagttaccggataaggcgcagcggtcgggctgaacggggggttcgtgcacacagcccagcttggagcgaacgacctacaccgaactgagatacctacagcgtgagctatgagaaagcgccacgcttcccgaagggagaaaggcggacaggtatccggtaagcggcagggtcggaacaggagagcgcacgagggagcttccagggggaaacgcctggtatctttatagtcctgtcgggtttcgccacctctgacttgagcgtcgatttttgtgatgctcgtcaggggggcggagcctatggaaaaacgccagcaacgcggcctttttacggttcctggccttttgctggccttttgctcacatgttctttcctgcgttatcccctgattctgtggataaccgtattaccgcctttgagtgagctgataccgctcgccgcagccgaacgaccgagcgcagcgagtcagtgagcgaggaagcggaagagcgcccaatacgcaaaccgcctctccccgcgcgttggccgattcattaatgcagctgtggaatgtgtgtcagttagggtgtggaaagtccccaggctccccagcaggcagaagtatgcaaagcatgcatctcaattagtcagcaaccaggtgtggaaagtccccaggctccccagcaggcagaagtatgcaaagcatgcatctcaattagtcagcaaccatagtcccgcccctaactccgcccatcccgcccctaactccgcccagttccgcccattctccgccccatggctgactaattttttttatttatgcagaggccgaggccgcctcggcctctgagctattccagaagtagtgaggaggcttttttggaggcctaggcttttgcaaaaagcttggacacaagacaggcttgcgagatatgtttgagaataccactttatcccgcgtcagggagaggcagtgcgtaaaaagacgcggactcatgtgaaatactggtttttagtgcgccagatctctataatctcgcgcaacctattttcccctcgaacactttttaagccgtagataaacaggctgggacacttcacatgagcgaaaaatacatcgtcacctgggacatgttgcagatccatgcacgtaaactcgcaagccgactgatgccttctgaacaatggaaaggcattattgccgtaagccgtggcggtctgtaccgggtgcgttactggcgcgtgaactgggtattcgtcatgtcgataccgtttgtatttccagctacgatcacgacaaccagcgcgagcttaaagtgctgaaacgcgcagaaggcgatggcgaaggcttcatcgttattgatgacctggtggataccggtggtactgcggttgcgattcgtgaaatgtatccaaaagcgcactttgtcaccatcttcgcaaaaccggctggtcgtccgctggttgatgactatgttgttgatatcccgcaagatacctggattgaacagccgtgggatatgggcgtcgtattcgtcccgccaatctccggtcgctaatcttttcaacgcctggcactgccgggcgttgttctttttaacttcaggcgggttacaatagtttccagtaagtattctggaggctgcatccatgacacaggcaaacctgagcgaaaccctgttcaaaccccgctttaaacatcctgaaacctcgacgctagtccgccgctttaatcacggcgcacaaccgcctgtgcagtcggcccttgatggtaaaaccatccctcactggtatcgcatgattaaccgtctgatgtggatctggcgcggcattgacccacgcgaaatcctcgacgtccaggcacgtattgtgatgagcgatgccgaacgtaccgacgatgatttatacgatacggtgattggctaccgtggcggcaactggatttatgagtgggccccggatctttgtgaaggaaccttacttctgtggtgtgacataattggacaaactacctacagagatttaaagctctaaggtaaatataaaatttttaagtgtataatgtgttaaactactgattctaattgtttgtgtattttagattccaacctatggaactgatgaatgggagcagtggtggaatgcctttaatgaggaaaacctgttttgctcagaagaaatgccatctagtgatgatgaggctactgctgactctcaacattctactcctccaaaaaagaagagaaaggtagaagaccccaaggactttccttcagaattgctaagttttttgagtcatgctgtgtttagtaatagaactcttgcttgctttgctatttacaccacaaaggaaaaagctgcactgctatacaagaaaattatggaaaaatattctgtaacctttataagtaggcataacagttataatcataacatactgttttttcttactccacacaggcatagagtgtctgctattaataactatgctcaaaaattgtgtacctttagctttttaatttgtaaaggggttaataaggaatatttgatgtatagtgccttgactagagatcataatcagccataccacatttgtagaggttttacttgctttaaaaaacctcccacacctccccctgaacctgaaacataaaatgaatgcaattgttgttgttaacttgtttattgcagcttataatggttacaaataaagcaatagcatcacaaatttcacaaataaagcatttttttcactgcattctagttgtggtttgtccaaactcatcaatgtatcttatcatgtctggatcaactggataactcaagctaaccaaaatcatcccaaacttcccaccccataccctattaccactgccaattacctagtggtttcatttactctaaacctgtgattcctctgaattattttcattttaaagaaattgtatttgttaaatatgtactacaaacttagtagt

SEQ ID NO: 179 - DNA, 11422 bp, Artificial sequence
  Synthetic construct
tggaagggctaattcactcccaaagaagacaagatatccttgatctgtggatctaccacacacaaggctacttccctgattagcagaactacacaccagggccaggggtcagatatccactgacctttggatggtgctacaagctagtaccagttgagccagataaggtagaagaggccaataaaggagagaacaccagcttgttacaccctgtgagcctgcatgggatggatgacccggagagagaagtgttagagtggaggtttgacagccgcctagcatttcatcacgtggcccgagagctgcatccggagtacttcaagaactgctgatatcgagcttgctacaagggactttccgctggggactttccagggaggcgtggcctgggcgggactggggagtggcgagccctcagatcctgcatataagcagctgctttttgcctgtactgggtctctctggttagaccagatctgagcctgggagctctctggctaactagggaacccactgcttaagcctcaataaagcttgccttgagtgcttcaagtagtgtgtgcccgtctgttgtgtgactctggtaactagagatccctcagacccttttagtcagtgtggaaaatctctagcagtggcgcccgaacagggacttgaaagcgaaagggaaaccagaggagctctctcgacgcaggactcggcttgctgaagcgcgcacggcaagaggcgaggggcggcgactggtgagtacgccaaaaattttgactagcggaggctagaaggagagagatgggtgcgagagcgtcagtattaagcgggggagaattagatcgcgatgggaaaaaattcggttaaggccagggggaaagaaaaaatataaattaaaacatatagtatgggcaagcagggagctagaacgattcgcagttaatcctggcctgttagaaacatcagaaggctgtagacaaatactgggacagctacaaccatcccttcagacaggatcagaagaacttagatcattatataatacagtagcaaccctctattgtgtgcatcaaaggatagagataaaagacaccaaggaagctttagacaagatagaggaagagcaaaacaaaagtaagaccaccgcacagcaagcggccggtgatcttcagacctggacgatatatatgagggacaattggagaagtgaattatataaatataaagtagtaaaaattgaaccattaggagtagcacccaccaaggcaaagagaagagtggtgcagagagaaaaaagagcagtgggaataggagctttgttccttgggttcttgggagcagcaggaagcactatgggcgcagcgtcaatgacgctgacggtacaggccagacaattattgtctggtatagtgcagcagcagaacaatttgctgagggctattgaggcgcaacagcatctgttgcaactcacagtctggggcatcaagcagctccaggcaagaatcctggctgtggaaagatacctaaaggatcaacagctcctggggatttggggttgctctggaaaactcatttgcaccactgctgtgccttggaatgctagttggagtaataaatctctggaacagatttggaatcacacgacctggatggagtgggacagagaaattaacaattacacaagcttaatacactccttaattgaagaatcgcaaaaccagcaagaaaagaatgaacaagaattattggaattagataaatgggcaagtttgtggaattggtttaacataacaaattggctgtggtatataaaattattcataatgatagtaggaggcttggtaggtttaagaatagtttttgctgtactttctatagtgaatagagttaggcagggatattcaccattatcgtttcagacccacctcccaaccccgaggggacccgacaggcccgaaggaatagaagaagaaggtggagagagagacagagacagatccattcgattagtgaacggatctcgacggtcgccaaatggcagtattcatccacaattttaaaagaaaaggggggattggggggtacagtgcaggggaaagaatagtagacataatagcaacagacatacaaactaaagaattacaaaaacaaattacaaaaattcaaaattttcgggtttattacagggacagcagagatccagtttggatcgataagcttgatatcgaattgggtaggggaggcgcttttcccaaggcagtctggagcatgcgctttagcagccccgctgggcacttggcgctacacaagtggcctctggcctcgcacacattccacatccaccggtaggcgccaaccggctccgttctttggtggccccttcgcgccaccttctactcctcccctagtcaggaagttcccccccgccccgcagctcgcgtcgtgcaggacgtgacaaatggaagtagcacgtctcactagtctcgtgcagatggacagcaccgctgagcaatggaagcgggtaggcctttggggcagcggccaatagcagctttgctccttcgctttctgggctcagaggctgggaaggggtgggtccgggggcgggctcaggggcgggctcaggggcggggcgggcgcccgaaggtcctccggaggcccggcattctgcacgcttcaaaagcgcacgtctgccgcgctgttctcctcttcctcatctccgggcctttcgaattctcacgcgtcaagtggagcaaggcaggtggacagtggatcatggcgttgcctgtcacggcactgctccttccccttgcacttcttcttcatgcagctcgccccgagcagaaattgatctccgaagaagaccttcaggtccaactgcagcaatcaggtggaggacttgtgaaaccaggagggagtctgaggcttagctgcgcagcgagtgggtttactttctctagttacgccatgcactgggtgcgccaagcccccgggaaaggactggagtgggtcgctgttatttcatatgacgggtcaaataaatactacgccgattcagtaaagggtcgatttactatatctagggacaacagtaagaacacactttatctgcagatggatagcctgcgggcggaggacactgcagtctactattgcgcgaaggaaggagacagctcacgctggagctacgacctctggggaagggggactctcgtaacggtgtcatccggcggtggcggcagcggtggtggtggatcagggggaggggggtctcagtcagcactcacccaacccgcatccgtgtctggtagtccgggccagagtattactatctcctgtactgggacatcctccgacgttgggggctataactacgtcagctggtatcaacagcaccctggtaaggcacccaaggtaatgatctatgatgtgacaaacagacccagcggtgtttctaaccgatttagcggttcaaaatcaggtaacaccgcaagccttaccatatctggtctccaggctgaagacgaagccgactattactgcagcagctataccatagcctctacactggttgtcttcggaggaggcactaagctgactgtgctaaccacgacgccagcgccgcgaccaccaacaccggcgcccaccatcgcgtcgcagcccctgtccctgcgcccagaggcgtgctttatgtacgtggcagccgcggcatttgtacttctgtttttcgtggggtgcggtgtgcttctcagcaagaggaaacggaagcaccccaagaaaaagaggaaggtgtctagaccaggcgaacgaccgtttcaatgccggatatgtatgaggaacttctcccagcagaccaatctcacgcggcacacccgaacacatacaggagaaaagccattccaatgtcgaatttgtatgcgcaatttttcacagaaggctaacctcggcgttcacctccgcacacatactggttcacagaagccctttcagtgcaggatttgtatgcgcaactttagcgatcactcatctctgaaacgccacactagaacgcatacaggtgagaagcctttccagtgtcgcatctgtatgcggaacttcagccgagcggatatgcttagacgccatttgcgaactcacaccggttctcaaaaaccttttcagtgccgaatttgtatgcgcaacttcagcgagaaacagaacctggcacgccacacgcgcacgcacaccggggaaaaaccgtttcaatgtcgaatctgcatgcgcaattttagcgacccctctaatcttaggaggcatctgcgcacacacttgcgggatgagtttcccaccatggtgtttccttctgggcagatcagccaggcctcggccttggccccggcccctccccaagtcctgccccaggctccagcccctgcccctgctccagccatggtatcagctctggcccaggccccagcccctgtcccagtcctagccccaggccctcctcaggctgtggccccacctgcccccaagcccacccaggctggggaaggaacgctgtcagaggccctgctgcagctgcagtttgatgatgaagacctgggggccttgcttggcaacagcacagacccagctgtgttcacagacctggcatccgtcgacaactccgagtttcagcagctgctgaaccagggcatacctgtggccccccacacaactgagcccatgctgatggagtaccctgaggctataactcgcctagtgacaggggcccagaggccccccgacccagctcctgctccactgggggccccggggctccccaatggcctcctttcaggagatgaagacttctcctccattgcggacatggacttctcagccctgctgagtcagatcagctccagtgggcagggaggaggtggaagcggcttcagcgtggacaccagtgccctgctggacctgttcagcccctcggtgaccgtgcccgacatgagcctgcctgaccttgacagcagcctggccagtatccaagagctcctgtctccccaggagccccccaggcctcccgaggcagagaacagcagcccggattcagggaagcagctggtgcactacacagcgcagccgctgttcctgctggaccccggctccgtggacaccgggagcaacgacctgccggtgctgtttgagctgggagagggctcctacttctccgaaggggacggcttcgccgaggaccccaccatctccctgctgacaggctcggagcctcccaaagccaaggaccccactgtctcctaagcggccgctaatcaacctctggattacaaaatttgtgaaagattgactggtattcttaactatgttgctccttttacgctatgtggatacgctgctttaatgcctttgtatcatgctattgcttcccgtatggctttcattttctcctccttgtataaatcctggttgctgtctctttatgaggagttgtggcccgttgtcaggcaacgtggcgtggtgtgcactgtgtttgctgacgcaacccccactggttggggcattgccaccacctgtcagctcctttccgggactttcgctttccccctccctattgccacggcggaactcatcgccgcctgccttgcccgctgctggacaggggctcggctgttgggcactgacaattccgtggtgttgtcggggaaatcatcgtcctttccttggctgctcgcctgtgttgccacctggattctgcgcgggacgtccttctgctacgtcccttcggccctcaatccagcggaccttccttcccgcggcctgctgccggctctgcggcctcttccgcgtcttcgccttcgccctcagacgagtcggatctccctttgggccgcctccccgcatcgataccgtcgaccgcgagggaattaattcgagctcggtacctttaagaccaatgacttacaaggcagctgtagatcttagccactttttaaaagaaaaggggggactggaagggctaattcactcccaacgaagacaagatctgctttttgcttgtactgggtctctctggttagaccagatctgagcctgggagctctctggctaactagggaacccactgcttaagcctcaataaagcttgccttgagtgcttcaagtagtgtgtgcccgtctgttgtgtgactctggtaactagagatccctcagacccttttagtcagtgtggaaaatctctagcagcatctagaattaattccgtgtattctatagtgtcacctaaatcgtatgtgtatgatacataaggttatgtattaattgtagccgcgttctaacgacaatatgtacaagcctaattgtgtagcatctggcttactgaagcagaccctatcatctctctcgtaaactgccgtcagagtcggtttggttggacgaaccttctgagtttctggtaacgccgtcccgcacccggaaatggtcagcgaaccaatcagcagggtcatcgctagccagatcctctacgccggacgcatcgtggccggcatcaccggcgccacaggtgcggttgctggcgcctatatcgccgacatcaccgatggggaagatcgggctcgccacttcgggctcatgagcgcttgtttcggcgtgggtatggtggcaggccccgtggccgggggactgttgggcgccatctccttgcatgcaccattccttgcggcggcggtgctcaacggcctcaacctactactgggctgcttcctaatgcaggagtcgcataagggagagcgtcgaatggtgcactctcagtacaatctagctctgatgccgcatagttaagccagccccgacacccgccaacacccgctgacgcgccctgacgggcttgtctgctcccggcatccgcttacagacaagctgtgaccgtctccgggagctgcatgtgtcagaggttttcaccgtcatcaccgaaacgcgcgagacgaaagggcctcgtgatacgcctatttttataggttaatgtcatgataataatggtttcttagacgtcaggtggcacttttcggggaaatgtgcgcggaacccctatttgtttatttttctaaatacattcaaatatgtatccgctcatgagacaataaccctgataaatgcttcaataatattgaaaaaggaagagtatgagtattcaacatttccgtgtcgcccttattcccttttttgcggcattttgccttcctgtttttgctcacccagaaacgctggtgaaagtaaaagatgctgaagatcagttgggtgcacgagtgggttacatcgaactggatctcaacagcggtaagatccttgagagttttcgccccgaagaacgttttccaatgatgagcacttttaaagttctgctatgtggcgcggtattatcccgtattgacgccgggcaagagcaactcggtcgccgcatacactattctcagaatgacttggttgagtactcaccagtcacagaaaagcatcttacggatggcatgacagtaagagaattatgcagtgctgccataaccatgagtgataacactgcggccaacttacttctgacaacgatcggaggaccgaaggagctaaccgcttttttgcacaacatgggggatcatgtaactcgccttgatcgttgggaaccggagctgaatgaagccataccaaacgacgagcgtgacaccacgatgcctgtagcaatggcaacaacgttgcgcaaactattaactggcgaactacttactctagcttcccggcaacaattaatagactggatggaggcggataaagttgcaggaccacttctgcgctcggcccttccggctggctggtttattgctgataaatctggagccggtgagcgtgggtctcgcggtatcattgcagcactggggccagatggtaagccctcccgtatcgtagttatctacacgacggggagtcaggcaactatggatgaacgaaatagacagatcgctgagataggtgcctcactgattaagcattggtaactgtcagaccaagtttactcatatatactttagattgatttaaaacttcatttttaatttaaaaggatctaggtgaagatcctttttgataatctcatgaccaaaatcccttaacgtgagttttcgttccactgagcgtcagaccccgtagaaaagatcaaaggatcttcttgagatcctttttttctgcgcgtaatctgctgcttgcaaacaaaaaaaccaccgctaccagcggtggtttgtttgccggatcaagagctaccaactctttttccgaaggtaactggcttcagcagagcgcagataccaaatactgtccttctagtgtagccgtagttaggccaccacttcaagaactctgtagcaccgcctacatacctcgctctgctaatcctgttaccagtggctgctgccagtggcgataagtcgtgtcttaccgggttggactcaagacgatagttaccggataaggcgcagcggtcgggctgaacggggggttcgtgcacacagcccagcttggagcgaacgacctacaccgaactgagatacctacagcgtgagctatgagaaagcgccacgcttcccgaagggagaaaggcggacaggtatccggtaagcggcagggtcggaacaggagagcgcacgagggagcttccagggggaaacgcctggtatctttatagtcctgtcgggtttcgccacctctgacttgagcgtcgatttttgtgatgctcgtcaggggggcggagcctatggaaaaacgccagcaacgcggcctttttacggttcctggccttttgctggccttttgctcacatgttctttcctgcgttatcccctgattctgtggataaccgtattaccgcctttgagtgagctgataccgctcgccgcagccgaacgaccgagcgcagcgagtcagtgagcgaggaagcggaagagcgcccaatacgcaaaccgcctctccccgcgcgttggccgattcattaatgcagctgtggaatgtgtgtcagttagggtgtggaaagtccccaggctccccagcaggcagaagtatgcaaagcatgcatctcaattagtcagcaaccaggtgtggaaagtccccaggctccccagcaggcagaagtatgcaaagcatgcatctcaattagtcagcaaccatagtcccgcccctaactccgcccatcccgcccctaactccgcccagttccgcccattctccgccccatggctgactaattttttttatttatgcagaggccgaggccgcctcggcctctgagctattccagaagtagtgaggaggcttttttggaggcctaggcttttgcaaaaagcttggacacaagacaggcttgcgagatatgtttgagaataccactttatcccgcgtcagggagaggcagtgcgtaaaaagacgcggactcatgtgaaatactggtttttagtgcgccagatctctataatctcgcgcaacctattttcccctcgaacactttttaagccgtagataaacaggctgggacacttcacatgagcgaaaaatacatcgtcacctgggacatgttgcagatccatgcacgtaaactcgcaagccgactgatgccttctgaacaatggaaaggcattattgccgtaagccgtggcggtctgtaccgggtgcgttactggcgcgtgaactgggtattcgtcatgtcgataccgtttgtatttccagctacgatcacgacaaccagcgcgagcttaaagtgctgaaacgcgcagaaggcgatggcgaaggcttcatcgttattgatgacctggtggataccggtggtactgcggttgcgattcgtgaaatgtatccaaaagcgcactttgtcaccatcttcgcaaaaccggctggtcgtccgctggttgatgactatgttgttgatatcccgcaagatacctggattgaacagccgtgggatatgggcgtcgtattcgtcccgccaatctccggtcgctaatcttttcaacgcctggcactgccgggcgttgttctttttaacttcaggcgggttacaatagtttccagtaagtattctggaggctgcatccatgacacaggcaaacctgagcgaaaccctgttcaaaccccgctttaaacatcctgaaacctcgacgctagtccgccgctttaatcacggcgcacaaccgcctgtgcagtcggcccttgatggtaaaaccatccctcactggtatcgcatgattaaccgtctgatgtggatctggcgcggcattgacccacgcgaaatcctcgacgtccaggcacgtattgtgatgagcgatgccgaacgtaccgacgatgatttatacgatacggtgattggctaccgtggcggcaactggatttatgagtgggccccggatctttgtgaaggaaccttacttctgtggtgtgacataattggacaaactacctacagagatttaaagctctaaggtaaatataaaatttttaagtgtataatgtgttaaactactgattctaattgtttgtgtattttagattccaacctatggaactgatgaatgggagcagtggtggaatgcctttaatgaggaaaacctgttttgctcagaagaaatgccatctagtgatgatgaggctactgctgactctcaacattctactcctccaaaaaagaagagaaaggtagaagaccccaaggactttccttcagaattgctaagttttttgagtcatgctgtgtttagtaatagaactcttgcttgctttgctatttacaccacaaaggaaaaagctgcactgctatacaagaaaattatggaaaaatattctgtaacctttataagtaggcataacagttataatcataacatactgttttttcttactccacacaggcatagagtgtctgctattaataactatgctcaaaaattgtgtacctttagctttttaatttgtaaaggggttaataaggaatatttgatgtatagtgccttgactagagatcataatcagccataccacatttgtagaggttttacttgctttaaaaaacctcccacacctccccctgaacctgaaacataaaatgaatgcaattgttgttgttaacttgtttattgcagcttataatggttacaaataaagcaatagcatcacaaatttcacaaataaagcatttttttcactgcattctagttgtggtttgtccaaactcatcaatgtatcttatcatgtctggatcaactggataactcaagctaaccaaaatcatcccaaacttcccaccccataccctattaccactgccaattacctagtggtttcatttactctaaacctgtgattcctctgaattattttcattttaaagaaattgtatttgttaaatatgtactacaaacttagtagt

SEQ ID NO: 180 - DNA, 11224 bp, Artificial sequence
  Synthetic construct
tggaagggctaattcactcccaaagaagacaagatatccttgatctgtggatctaccacacacaaggctacttccctgattagcagaactacacaccagggccaggggtcagatatccactgacctttggatggtgctacaagctagtaccagttgagccagataaggtagaagaggccaataaaggagagaacaccagcttgttacaccctgtgagcctgcatgggatggatgacccggagagagaagtgttagagtggaggtttgacagccgcctagcatttcatcacgtggcccgagagctgcatccggagtacttcaagaactgctgatatcgagcttgctacaagggactttccgctggggactttccagggaggcgtggcctgggcgggactggggagtggcgagccctcagatcctgcatataagcagctgctttttgcctgtactgggtctctctggttagaccagatctgagcctgggagctctctggctaactagggaacccactgcttaagcctcaataaagcttgccttgagtgcttcaagtagtgtgtgcccgtctgttgtgtgactctggtaactagagatccctcagacccttttagtcagtgtggaaaatctctagcagtggcgcccgaacagggacttgaaagcgaaagggaaaccagaggagctctctcgacgcaggactcggcttgctgaagcgcgcacggcaagaggcgaggggcggcgactggtgagtacgccaaaaattttgactagcggaggctagaaggagagagatgggtgcgagagcgtcagtattaagcgggggagaattagatcgcgatgggaaaaaattcggttaaggccagggggaaagaaaaaatataaattaaaacatatagtatgggcaagcagggagctagaacgattcgcagttaatcctggcctgttagaaacatcagaaggctgtagacaaatactgggacagctacaaccatcccttcagacaggatcagaagaacttagatcattatataatacagtagcaaccctctattgtgtgcatcaaaggatagagataaaagacaccaaggaagctttagacaagatagaggaagagcaaaacaaaagtaagaccaccgcacagcaagcggccggtgatcttcagacctggacgatatatatgagggacaattggagaagtgaattatataaatataaagtagtaaaaattgaaccattaggagtagcacccaccaaggcaaagagaagagtggtgcagagagaaaaaagagcagtgggaataggagctttgttccttgggttcttgggagcagcaggaagcactatgggcgcagcgtcaatgacgctgacggtacaggccagacaattattgtctggtatagtgcagcagcagaacaatttgctgagggctattgaggcgcaacagcatctgttgcaactcacagtctggggcatcaagcagctccaggcaagaatcctggctgtggaaagatacctaaaggatcaacagctcctggggatttggggttgctctggaaaactcatttgcaccactgctgtgccttggaatgctagttggagtaataaatctctggaacagatttggaatcacacgacctggatggagtgggacagagaaattaacaattacacaagcttaatacactccttaattgaagaatcgcaaaaccagcaagaaaagaatgaacaagaattattggaattagataaatgggcaagtttgtggaattggtttaacataacaaattggctgtggtatataaaattattcataatgatagtaggaggcttggtaggtttaagaatagtttttgctgtactttctatagtgaatagagttaggcagggatattcaccattatcgtttcagacccacctcccaaccccgaggggacccgacaggcccgaaggaatagaagaagaaggtggagagagagacagagacagatccattcgattagtgaacggatctcgacggtcgccaaatggcagtattcatccacaattttaaaagaaaaggggggattggggggtacagtgcaggggaaagaatagtagacataatagcaacagacatacaaactaaagaattacaaaaacaaattacaaaaattcaaaattttcgggtttattacagggacagcagagatccagtttggatcgataagcttgatatcgaattgggtaggggaggcgcttttcccaaggcagtctggagcatgcgctttagcagccccgctgggcacttggcgctacacaagtggcctctggcctcgcacacattccacatccaccggtaggcgccaaccggctccgttctttggtggccccttcgcgccaccttctactcctcccctagtcaggaagttcccccccgccccgcagctcgcgtcgtgcaggacgtgacaaatggaagtagcacgtctcactagtctcgtgcagatggacagcaccgctgagcaatggaagcgggtaggcctttggggcagcggccaatagcagctttgctccttcgctttctgggctcagaggctgggaaggggtgggtccgggggcgggctcaggggcgggctcaggggcggggcgggcgcccgaaggtcctccggaggcccggcattctgcacgcttcaaaagcgcacgtctgccgcgctgttctcctcttcctcatctccgggcctttcgaattctcacgcgtcaagtggagcaaggcaggtggacagtggatcatggcgttgcctgtcacggcactgctccttccccttgcacttcttcttcatgcagctcgccccgagcagaaattgatctccgaagaagaccttcaggtccaactgcagcaatcaggtggaggacttgtgaaaccaggagggagtctgaggcttagctgcgcagcgagtgggtttactttctctagttacgccatgcactgggtgcgccaagcccccgggaaaggactggagtgggtcgctgttatttcatatgacgggtcaaataaatactacgccgattcagtaaagggtcgatttactatatctagggacaacagtaagaacacactttatctgcagatggatagcctgcgggcggaggacactgcagtctactattgcgcgaaggaaggagacagctcacgctggagctacgacctctggggaagggggactctcgtaacggtgtcatccggcggtggcggcagcggtggtggtggatcagggggaggggggtctcagtcagcactcacccaacccgcatccgtgtctggtagtccgggccagagtattactatctcctgtactgggacatcctccgacgttgggggctataactacgtcagctggtatcaacagcaccctggtaaggcacccaaggtaatgatctatgatgtgacaaacagacccagcggtgtttctaaccgatttagcggttcaaaatcaggtaacaccgcaagccttaccatatctggtctccaggctgaagacgaagccgactattactgcagcagctataccatagcctctacactggttgtcttcggaggaggcactaagctgactgtgctaaccacgacgccagcgccgcgaccaccaacaccggcgcccaccatcgcgtcgcagcccctgtccctgcgcccagaggcgtgctttatgtacgtggcagccgcggcatttgtacttctgtttttcgtggggtgcggtgtgcttctcagcaagaggaaacggaagcaccccaagaaaaagaggaaggtgtctagaccaggcgaacgaccgtttcaatgccggatatgtatgaggaacttctcccagcagaccaatctcacgcggcacacccgaacacatacaggagaaaagccattccaatgtcgaatttgtatgcgcaatttttcacagaaggctaacctcggcgttcacctccgcacacatactggttcacagaagccctttcagtgcaggatttgtatgcgcaactttagcgatcactcatctctgaaacgccacactagaacgcatacaggtgagaagcctttccagtgtcgcatctgtatgcggaacttcagccgagcggatatgcttagacgccatttgcgaactcacaccggttctcaaaaaccttttcagtgccgaatttgtatgcgcaacttcagcgagaaacagaacctggcacgccacacgcgcacgcacaccggggaaaaaccgtttcaatgtcgaatctgcatgcgcaattttagcgacccctctaatcttaggaggcatctgcgcacacacttgcgggatgagtttcccaccatggtgtttccttctgggcagatcagccaggcctcggccttggccccggcccctccccaagtcctgccccaggctccagcccctgcccctgctccagccatggtatcagctctggcccaggccccagcccctgtcccagtcctagccccaggccctcctcaggctgtggccccacctgcccccaagcccacccaggctggggaaggaacgctgtcagaggccctgctgcagctgcagtttgatgatgaagacctgggggccttgcttggcaacagcacagacccagctgtgttcacagacctggcatccgtcgacaactccgagtttcagcagctgctgaaccagggcatacctgtggccccccacacaactgagcccatgctgatggagtaccctgaggctataactcgcctagtgacaggggcccagaggccccccgacccagctcctgctccactgggggccccggggctccccaatggcctcctttcaggagatgaagacttctcctccattgcggacatggacttctcagccctgctgagtcagatcagctccagtgggcagggaggaggtggaagcgaccaaagcacctttgacattttgcaggatttggagttttcttctgggtccccaggtaaagagacgaatgagagtccttggagatcagacctgttgatagatgaaaactgtttgctttctcctctggcgggagaagacgattcattccttttggaaggaaactcgaatgaggactaagcggccgctaatcaacctctggattacaaaatttgtgaaagattgactggtattcttaactatgttgctccttttacgctatgtggatacgctgctttaatgcctttgtatcatgctattgcttcccgtatggctttcattttctcctccttgtataaatcctggttgctgtctctttatgaggagttgtggcccgttgtcaggcaacgtggcgtggtgtgcactgtgtttgctgacgcaacccccactggttggggcattgccaccacctgtcagctcctttccgggactttcgctttccccctccctattgccacggcggaactcatcgccgcctgccttgcccgctgctggacaggggctcggctgttgggcactgacaattccgtggtgttgtcggggaaatcatcgtcctttccttggctgctcgcctgtgttgccacctggattctgcgcgggacgtccttctgctacgtcccttcggccctcaatccagcggaccttccttcccgcggcctgctgccggctctgcggcctcttccgcgtcttcgccttcgccctcagacgagtcggatctccctttgggccgcctccccgcatcgataccgtcgaccgcgagggaattaattcgagctcggtacctttaagaccaatgacttacaaggcagctgtagatcttagccactttttaaaagaaaaggggggactggaagggctaattcactcccaacgaagacaagatctgctttttgcttgtactgggtctctctggttagaccagatctgagcctgggagctctctggctaactagggaacccactgcttaagcctcaataaagcttgccttgagtgcttcaagtagtgtgtgcccgtctgttgtgtgactctggtaactagagatccctcagacccttttagtcagtgtggaaaatctctagcagcatctagaattaattccgtgtattctatagtgtcacctaaatcgtatgtgtatgatacataaggttatgtattaattgtagccgcgttctaacgacaatatgtacaagcctaattgtgtagcatctggcttactgaagcagaccctatcatctctctcgtaaactgccgtcagagtcggtttggttggacgaaccttctgagtttctggtaacgccgtcccgcacccggaaatggtcagcgaaccaatcagcagggtcatcgctagccagatcctctacgccggacgcatcgtggccggcatcaccggcgccacaggtgcggttgctggcgcctatatcgccgacatcaccgatggggaagatcgggctcgccacttcgggctcatgagcgcttgtttcggcgtgggtatggtggcaggccccgtggccgggggactgttgggcgccatctccttgcatgcaccattccttgcggcggcggtgctcaacggcctcaacctactactgggctgcttcctaatgcaggagtcgcataagggagagcgtcgaatggtgcactctcagtacaatctagctctgatgccgcatagttaagccagccccgacacccgccaacacccgctgacgcgccctgacgggcttgtctgctcccggcatccgcttacagacaagctgtgaccgtctccgggagctgcatgtgtcagaggttttcaccgtcatcaccgaaacgcgcgagacgaaagggcctcgtgatacgcctatttttataggttaatgtcatgataataatggtttcttagacgtcaggtggcacttttcggggaaatgtgcgcggaacccctatttgtttatttttctaaatacattcaaatatgtatccgctcatgagacaataaccctgataaatgcttcaataatattgaaaaaggaagagtatgagtattcaacatttccgtgtcgcccttattcccttttttgcggcattttgccttcctgtttttgctcacccagaaacgctggtgaaagtaaaagatgctgaagatcagttgggtgcacgagtgggttacatcgaactggatctcaacagcggtaagatccttgagagttttcgccccgaagaacgttttccaatgatgagcacttttaaagttctgctatgtggcgcggtattatcccgtattgacgccgggcaagagcaactcggtcgccgcatacactattctcagaatgacttggttgagtactcaccagtcacagaaaagcatcttacggatggcatgacagtaagagaattatgcagtgctgccataaccatgagtgataacactgcggccaacttacttctgacaacgatcggaggaccgaaggagctaaccgcttttttgcacaacatgggggatcatgtaactcgccttgatcgttgggaaccggagctgaatgaagccataccaaacgacgagcgtgacaccacgatgcctgtagcaatggcaacaacgttgcgcaaactattaactggcgaactacttactctagcttcccggcaacaattaatagactggatggaggcggataaagttgcaggaccacttctgcgctcggcccttccggctggctggtttattgctgataaatctggagccggtgagcgtgggtctcgcggtatcattgcagcactggggccagatggtaagccctcccgtatcgtagttatctacacgacggggagtcaggcaactatggatgaacgaaatagacagatcgctgagataggtgcctcactgattaagcattggtaactgtcagaccaagtttactcatatatactttagattgatttaaaacttcatttttaatttaaaaggatctaggtgaagatcctttttgataatctcatgaccaaaatcccttaacgtgagttttcgttccactgagcgtcagaccccgtagaaaagatcaaaggatcttcttgagatcctttttttctgcgcgtaatctgctgcttgcaaacaaaaaaaccaccgctaccagcggtggtttgtttgccggatcaagagctaccaactctttttccgaaggtaactggcttcagcagagcgcagataccaaatactgtccttctagtgtagccgtagttaggccaccacttcaagaactctgtagcaccgcctacatacctcgctctgctaatcctgttaccagtggctgctgccagtggcgataagtcgtgtcttaccgggttggactcaagacgatagttaccggataaggcgcagcggtcgggctgaacggggggttcgtgcacacagcccagcttggagcgaacgacctacaccgaactgagatacctacagcgtgagctatgagaaagcgccacgcttcccgaagggagaaaggcggacaggtatccggtaagcggcagggtcggaacaggagagcgcacgagggagcttccagggggaaacgcctggtatctttatagtcctgtcgggtttcgccacctctgacttgagcgtcgatttttgtgatgctcgtcaggggggcggagcctatggaaaaacgccagcaacgcggcctttttacggttcctggccttttgctggccttttgctcacatgttctttcctgcgttatcccctgattctgtggataaccgtattaccgcctttgagtgagctgataccgctcgccgcagccgaacgaccgagcgcagcgagtcagtgagcgaggaagcggaagagcgcccaatacgcaaaccgcctctccccgcgcgttggccgattcattaatgcagctgtggaatgtgtgtcagttagggtgtggaaagtccccaggctccccagcaggcagaagtatgcaaagcatgcatctcaattagtcagcaaccaggtgtggaaagtccccaggctccccagcaggcagaagtatgcaaagcatgcatctcaattagtcagcaaccatagtcccgcccctaactccgcccatcccgcccctaactccgcccagttccgcccattctccgccccatggctgactaattttttttatttatgcagaggccgaggccgcctcggcctctgagctattccagaagtagtgaggaggcttttttggaggcctaggcttttgcaaaaagcttggacacaagacaggcttgcgagatatgtttgagaataccactttatcccgcgtcagggagaggcagtgcgtaaaaagacgcggactcatgtgaaatactggtttttagtgcgccagatctctataatctcgcgcaacctattttcccctcgaacactttttaagccgtagataaacaggctgggacacttcacatgagcgaaaaatacatcgtcacctgggacatgttgcagatccatgcacgtaaactcgcaagccgactgatgccttctgaacaatggaaaggcattattgccgtaagccgtggcggtctgtaccgggtgcgttactggcgcgtgaactgggtattcgtcatgtcgataccgtttgtatttccagctacgatcacgacaaccagcgcgagcttaaagtgctgaaacgcgcagaaggcgatggcgaaggcttcatcgttattgatgacctggtggataccggtggtactgcggttgcgattcgtgaaatgtatccaaaagcgcactttgtcaccatcttcgcaaaaccggctggtcgtccgctggttgatgactatgttgttgatatcccgcaagatacctggattgaacagccgtgggatatgggcgtcgtattcgtcccgccaatctccggtcgctaatcttttcaacgcctggcactgccgggcgttgttctttttaacttcaggcgggttacaatagtttccagtaagtattctggaggctgcatccatgacacaggcaaacctgagcgaaaccctgttcaaaccccgctttaaacatcctgaaacctcgacgctagtccgccgctttaatcacggcgcacaaccgcctgtgcagtcggcccttgatggtaaaaccatccctcactggtatcgcatgattaaccgtctgatgtggatctggcgcggcattgacccacgcgaaatcctcgacgtccaggcacgtattgtgatgagcgatgccgaacgtaccgacgatgatttatacgatacggtgattggctaccgtggcggcaactggatttatgagtgggccccggatctttgtgaaggaaccttacttctgtggtgtgacataattggacaaactacctacagagatttaaagctctaaggtaaatataaaatttttaagtgtataatgtgttaaactactgattctaattgtttgtgtattttagattccaacctatggaactgatgaatgggagcagtggtggaatgcctttaatgaggaaaacctgttttgctcagaagaaatgccatctagtgatgatgaggctactgctgactctcaacattctactcctccaaaaaagaagagaaaggtagaagaccccaaggactttccttcagaattgctaagttttttgagtcatgctgtgtttagtaatagaactcttgcttgctttgctatttacaccacaaaggaaaaagctgcactgctatacaagaaaattatggaaaaatattctgtaacctttataagtaggcataacagttataatcataacatactgttttttcttactccacacaggcatagagtgtctgctattaataactatgctcaaaaattgtgtacctttagctttttaatttgtaaaggggttaataaggaatatttgatgtatagtgccttgactagagatcataatcagccataccacatttgtagaggttttacttgctttaaaaaacctcccacacctccccctgaacctgaaacataaaatgaatgcaattgttgttgttaacttgtttattgcagcttataatggttacaaataaagcaatagcatcacaaatttcacaaataaagcatttttttcactgcattctagttgtggtttgtccaaactcatcaatgtatcttatcatgtctggatcaactggataactcaagctaaccaaaatcatcccaaacttcccaccccataccctattaccactgccaattacctagtggtttcatttactctaaacctgtgattcctctgaattattttcattttaaagaaattgtatttgttaaatatgtactacaaacttagtagt

SEQ ID NO: 181 - DNA, 11017 bp, Artificial sequence
  Synthetic construct
tggaagggctaattcactcccaaagaagacaagatatccttgatctgtggatctaccacacacaaggctacttccctgattagcagaactacacaccagggccaggggtcagatatccactgacctttggatggtgctacaagctagtaccagttgagccagataaggtagaagaggccaataaaggagagaacaccagcttgttacaccctgtgagcctgcatgggatggatgacccggagagagaagtgttagagtggaggtttgacagccgcctagcatttcatcacgtggcccgagagctgcatccggagtacttcaagaactgctgatatcgagcttgctacaagggactttccgctggggactttccagggaggcgtggcctgggcgggactggggagtggcgagccctcagatcctgcatataagcagctgctttttgcctgtactgggtctctctggttagaccagatctgagcctgggagctctctggctaactagggaacccactgcttaagcctcaataaagcttgccttgagtgcttcaagtagtgtgtgcccgtctgttgtgtgactctggtaactagagatccctcagacccttttagtcagtgtggaaaatctctagcagtggcgcccgaacagggacttgaaagcgaaagggaaaccagaggagctctctcgacgcaggactcggcttgctgaagcgcgcacggcaagaggcgaggggcggcgactggtgagtacgccaaaaattttgactagcggaggctagaaggagagagatgggtgcgagagcgtcagtattaagcgggggagaattagatcgcgatgggaaaaaattcggttaaggccagggggaaagaaaaaatataaattaaaacatatagtatgggcaagcagggagctagaacgattcgcagttaatcctggcctgttagaaacatcagaaggctgtagacaaatactgggacagctacaaccatcccttcagacaggatcagaagaacttagatcattatataatacagtagcaaccctctattgtgtgcatcaaaggatagagataaaagacaccaaggaagctttagacaagatagaggaagagcaaaacaaaagtaagaccaccgcacagcaagcggccggtgatcttcagacctggacgatatatatgagggacaattggagaagtgaattatataaatataaagtagtaaaaattgaaccattaggagtagcacccaccaaggcaaagagaagagtggtgcagagagaaaaaagagcagtgggaataggagctttgttccttgggttcttgggagcagcaggaagcactatgggcgcagcgtcaatgacgctgacggtacaggccagacaattattgtctggtatagtgcagcagcagaacaatttgctgagggctattgaggcgcaacagcatctgttgcaactcacagtctggggcatcaagcagctccaggcaagaatcctggctgtggaaagatacctaaaggatcaacagctcctggggatttggggttgctctggaaaactcatttgcaccactgctgtgccttggaatgctagttggagtaataaatctctggaacagatttggaatcacacgacctggatggagtgggacagagaaattaacaattacacaagcttaatacactccttaattgaagaatcgcaaaaccagcaagaaaagaatgaacaagaattattggaattagataaatgggcaagtttgtggaattggtttaacataacaaattggctgtggtatataaaattattcataatgatagtaggaggcttggtaggtttaagaatagtttttgctgtactttctatagtgaatagagttaggcagggatattcaccattatcgtttcagacccacctcccaaccccgaggggacccgacaggcccgaaggaatagaagaagaaggtggagagagagacagagacagatccattcgattagtgaacggatctcgacggtcgccaaatggcagtattcatccacaattttaaaagaaaaggggggattggggggtacagtgcaggggaaagaatagtagacataatagcaacagacatacaaactaaagaattacaaaaacaaattacaaaaattcaaaattttcgggtttattacagggacagcagagatccagtttggatcgataagcttgatatcgaattgggtaggggaggcgcttttcccaaggcagtctggagcatgcgctttagcagccccgctgggcacttggcgctacacaagtggcctctggcctcgcacacattccacatccaccggtaggcgccaaccggctccgttctttggtggccccttcgcgccaccttctactcctcccctagtcaggaagttcccccccgccccgcagctcgcgtcgtgcaggacgtgacaaatggaagtagcacgtctcactagtctcgtgcagatggacagcaccgctgagcaatggaagcgggtaggcctttggggcagcggccaatagcagctttgctccttcgctttctgggctcagaggctgggaaggggtgggtccgggggcgggctcaggggcgggctcaggggcggggcgggcgcccgaaggtcctccggaggcccggcattctgcacgcttcaaaagcgcacgtctgccgcgctgttctcctcttcctcatctccgggcctttcgaattctcacgcgtcaagtggagcaaggcaggtggacagtggatcatggcgttgcctgtcacggcactgctccttccccttgcacttcttcttcatgcagctcgccccgagcagaaattgatctccgaagaagaccttcaggtccaactgcagcaatcaggtggaggacttgtgaaaccaggagggagtctgaggcttagctgcgcagcgagtgggtttactttctctagttacgccatgcactgggtgcgccaagcccccgggaaaggactggagtgggtcgctgttatttcatatgacgggtcaaataaatactacgccgattcagtaaagggtcgatttactatatctagggacaacagtaagaacacactttatctgcagatggatagcctgcgggcggaggacactgcagtctactattgcgcgaaggaaggagacagctcacgctggagctacgacctctggggaagggggactctcgtaacggtgtcatccggcggtggcggcagcggtggtggtggatcagggggaggggggtctcagtcagcactcacccaacccgcatccgtgtctggtagtccgggccagagtattactatctcctgtactgggacatcctccgacgttgggggctataactacgtcagctggtatcaacagcaccctggtaaggcacccaaggtaatgatctatgatgtgacaaacagacccagcggtgtttctaaccgatttagcggttcaaaatcaggtaacaccgcaagccttaccatatctggtctccaggctgaagacgaagccgactattactgcagcagctataccatagcctctacactggttgtcttcggaggaggcactaagctgactgtgctaaccacgacgccagcgccgcgaccaccaacaccggcgcccaccatcgcgtcgcagcccctgtccctgcgcccagaggcgtgctttatgtacgtggcagccgcggcatttgtacttctgtttttcgtggggtgcggtgtgcttctcagcaagaggaaacggaagcaccggaggaagaagtctagaccaggcgaacgaccgtttcaatgccggatatgtatgaggaacttctcccagcagaccaatctcacgcggcacacccgaacacatacaggagaaaagccattccaatgtcgaatttgtatgcgcaatttttcacagaaggctaacctcggcgttcacctccgcacacatactggttcacagaagccctttcagtgcaggatttgtatgcgcaactttagcgatcactcatctctgaaacgccacactagaacgcatacaggtgagaagcctttccagtgtcgcatctgtatgcggaacttcagccgagcggatatgcttagacgccatttgcgaactcacaccggttctcaaaaaccttttcagtgccgaatttgtatgcgcaacttcagcgagaaacagaacctggcacgccacacgcgcacgcacaccggggaaaaaccgtttcaatgtcgaatctgcatgcgcaattttagcgacccctctaatcttaggaggcatctgcgcacacacttgcgggatgagtttcccaccatggtgtttccttctgggcagatcagccaggcctcggccttggccccggcccctccccaagtcctgccccaggctccagcccctgcccctgctccagccatggtatcagctctggcccaggccccagcccctgtcccagtcctagccccaggccctcctcaggctgtggccccacctgcccccaagcccacccaggctggggaaggaacgctgtcagaggccctgctgcagctgcagtttgatgatgaagacctgggggccttgcttggcaacagcacagacccagctgtgttcacagacctggcatccgtcgacaactccgagtttcagcagctgctgaaccagggcatacctgtggccccccacacaactgagcccatgctgatggagtaccctgaggctataactcgcctagtgacaggggcccagaggccccccgacccagctcctgctccactgggggccccggggctccccaatggcctcctttcaggagatgaagacttctcctccattgcggacatggacttctcagccctgctgagtcagatcagctcctaagcggccgctaatcaacctctggattacaaaatttgtgaaagattgactggtattcttaactatgttgctccttttacgctatgtggatacgctgctttaatgcctttgtatcatgctattgcttcccgtatggctttcattttctcctccttgtataaatcctggttgctgtctctttatgaggagttgtggcccgttgtcaggcaacgtggcgtggtgtgcactgtgtttgctgacgcaacccccactggttggggcattgccaccacctgtcagctcctttccgggactttcgctttccccctccctattgccacggcggaactcatcgccgcctgccttgcccgctgctggacaggggctcggctgttgggcactgacaattccgtggtgttgtcggggaaatcatcgtcctttccttggctgctcgcctgtgttgccacctggattctgcgcgggacgtccttctgctacgtcccttcggccctcaatccagcggaccttccttcccgcggcctgctgccggctctgcggcctcttccgcgtcttcgccttcgccctcagacgagtcggatctccctttgggccgcctccccgcatcgataccgtcgaccgcgagggaattaattcgagctcggtacctttaagaccaatgacttacaaggcagctgtagatcttagccactttttaaaagaaaaggggggactggaagggctaattcactcccaacgaagacaagatctgctttttgcttgtactgggtctctctggttagaccagatctgagcctgggagctctctggctaactagggaacccactgcttaagcctcaataaagcttgccttgagtgcttcaagtagtgtgtgcccgtctgttgtgtgactctggtaactagagatccctcagacccttttagtcagtgtggaaaatctctagcagcatctagaattaattccgtgtattctatagtgtcacctaaatcgtatgtgtatgatacataaggttatgtattaattgtagccgcgttctaacgacaatatgtacaagcctaattgtgtagcatctggcttactgaagcagaccctatcatctctctcgtaaactgccgtcagagtcggtttggttggacgaaccttctgagtttctggtaacgccgtcccgcacccggaaatggtcagcgaaccaatcagcagggtcatcgctagccagatcctctacgccggacgcatcgtggccggcatcaccggcgccacaggtgcggttgctggcgcctatatcgccgacatcaccgatggggaagatcgggctcgccacttcgggctcatgagcgcttgtttcggcgtgggtatggtggcaggccccgtggccgggggactgttgggcgccatctccttgcatgcaccattccttgcggcggcggtgctcaacggcctcaacctactactgggctgcttcctaatgcaggagtcgcataagggagagcgtcgaatggtgcactctcagtacaatctagctctgatgccgcatagttaagccagccccgacacccgccaacacccgctgacgcgccctgacgggcttgtctgctcccggcatccgcttacagacaagctgtgaccgtctccgggagctgcatgtgtcagaggttttcaccgtcatcaccgaaacgcgcgagacgaaagggcctcgtgatacgcctatttttataggttaatgtcatgataataatggtttcttagacgtcaggtggcacttttcggggaaatgtgcgcggaacccctatttgtttatttttctaaatacattcaaatatgtatccgctcatgagacaataaccctgataaatgcttcaataatattgaaaaaggaagagtatgagtattcaacatttccgtgtcgcccttattcccttttttgcggcattttgccttcctgtttttgctcacccagaaacgctggtgaaagtaaaagatgctgaagatcagttgggtgcacgagtgggttacatcgaactggatctcaacagcggtaagatccttgagagttttcgccccgaagaacgttttccaatgatgagcacttttaaagttctgctatgtggcgcggtattatcccgtattgacgccgggcaagagcaactcggtcgccgcatacactattctcagaatgacttggttgagtactcaccagtcacagaaaagcatcttacggatggcatgacagtaagagaattatgcagtgctgccataaccatgagtgataacactgcggccaacttacttctgacaacgatcggaggaccgaaggagctaaccgcttttttgcacaacatgggggatcatgtaactcgccttgatcgttgggaaccggagctgaatgaagccataccaaacgacgagcgtgacaccacgatgcctgtagcaatggcaacaacgttgcgcaaactattaactggcgaactacttactctagcttcccggcaacaattaatagactggatggaggcggataaagttgcaggaccacttctgcgctcggcccttccggctggctggtttattgctgataaatctggagccggtgagcgtgggtctcgcggtatcattgcagcactggggccagatggtaagccctcccgtatcgtagttatctacacgacggggagtcaggcaactatggatgaacgaaatagacagatcgctgagataggtgcctcactgattaagcattggtaactgtcagaccaagtttactcatatatactttagattgatttaaaacttcatttttaatttaaaaggatctaggtgaagatcctttttgataatctcatgaccaaaatcccttaacgtgagttttcgttccactgagcgtcagaccccgtagaaaagatcaaaggatcttcttgagatcctttttttctgcgcgtaatctgctgcttgcaaacaaaaaaaccaccgctaccagcggtggtttgtttgccggatcaagagctaccaactctttttccgaaggtaactggcttcagcagagcgcagataccaaatactgtccttctagtgtagccgtagttaggccaccacttcaagaactctgtagcaccgcctacatacctcgctctgctaatcctgttaccagtggctgctgccagtggcgataagtcgtgtcttaccgggttggactcaagacgatagttaccggataaggcgcagcggtcgggctgaacggggggttcgtgcacacagcccagcttggagcgaacgacctacaccgaactgagatacctacagcgtgagctatgagaaagcgccacgcttcccgaagggagaaaggcggacaggtatccggtaagcggcagggtcggaacaggagagcgcacgagggagcttccagggggaaacgcctggtatctttatagtcctgtcgggtttcgccacctctgacttgagcgtcgatttttgtgatgctcgtcaggggggcggagcctatggaaaaacgccagcaacgcggcctttttacggttcctggccttttgctggccttttgctcacatgttctttcctgcgttatcccctgattctgtggataaccgtattaccgcctttgagtgagctgataccgctcgccgcagccgaacgaccgagcgcagcgagtcagtgagcgaggaagcggaagagcgcccaatacgcaaaccgcctctccccgcgcgttggccgattcattaatgcagctgtggaatgtgtgtcagttagggtgtggaaagtccccaggctccccagcaggcagaagtatgcaaagcatgcatctcaattagtcagcaaccaggtgtggaaagtccccaggctccccagcaggcagaagtatgcaaagcatgcatctcaattagtcagcaaccatagtcccgcccctaactccgcccatcccgcccctaactccgcccagttccgcccattctccgccccatggctgactaattttttttatttatgcagaggccgaggccgcctcggcctctgagctattccagaagtagtgaggaggcttttttggaggcctaggcttttgcaaaaagcttggacacaagacaggcttgcgagatatgtttgagaataccactttatcccgcgtcagggagaggcagtgcgtaaaaagacgcggactcatgtgaaatactggtttttagtgcgccagatctctataatctcgcgcaacctattttcccctcgaacactttttaagccgtagataaacaggctgggacacttcacatgagcgaaaaatacatcgtcacctgggacatgttgcagatccatgcacgtaaactcgcaagccgactgatgccttctgaacaatggaaaggcattattgccgtaagccgtggcggtctgtaccgggtgcgttactggcgcgtgaactgggtattcgtcatgtcgataccgtttgtatttccagctacgatcacgacaaccagcgcgagcttaaagtgctgaaacgcgcagaaggcgatggcgaaggcttcatcgttattgatgacctggtggataccggtggtactgcggttgcgattcgtgaaatgtatccaaaagcgcactttgtcaccatcttcgcaaaaccggctggtcgtccgctggttgatgactatgttgttgatatcccgcaagatacctggattgaacagccgtgggatatgggcgtcgtattcgtcccgccaatctccggtcgctaatcttttcaacgcctggcactgccgggcgttgttctttttaacttcaggcgggttacaatagtttccagtaagtattctggaggctgcatccatgacacaggcaaacctgagcgaaaccctgttcaaaccccgctttaaacatcctgaaacctcgacgctagtccgccgctttaatcacggcgcacaaccgcctgtgcagtcggcccttgatggtaaaaccatccctcactggtatcgcatgattaaccgtctgatgtggatctggcgcggcattgacccacgcgaaatcctcgacgtccaggcacgtattgtgatgagcgatgccgaacgtaccgacgatgatttatacgatacggtgattggctaccgtggcggcaactggatttatgagtgggccccggatctttgtgaaggaaccttacttctgtggtgtgacataattggacaaactacctacagagatttaaagctctaaggtaaatataaaatttttaagtgtataatgtgttaaactactgattctaattgtttgtgtattttagattccaacctatggaactgatgaatgggagcagtggtggaatgcctttaatgaggaaaacctgttttgctcagaagaaatgccatctagtgatgatgaggctactgctgactctcaacattctactcctccaaaaaagaagagaaaggtagaagaccccaaggactttccttcagaattgctaagttttttgagtcatgctgtgtttagtaatagaactcttgcttgctttgctatttacaccacaaaggaaaaagctgcactgctatacaagaaaattatggaaaaatattctgtaacctttataagtaggcataacagttataatcataacatactgttttttcttactccacacaggcatagagtgtctgctattaataactatgctcaaaaattgtgtacctttagctttttaatttgtaaaggggttaataaggaatatttgatgtatagtgccttgactagagatcataatcagccataccacatttgtagaggttttacttgctttaaaaaacctcccacacctccccctgaacctgaaacataaaatgaatgcaattgttgttgttaacttgtttattgcagcttataatggttacaaataaagcaatagcatcacaaatttcacaaataaagcatttttttcactgcattctagttgtggtttgtccaaactcatcaatgtatcttatcatgtctggatcaactggataactcaagctaaccaaaatcatcccaaacttcccaccccataccctattaccactgccaattacctagtggtttcatttactctaaacctgtgattcctctgaattattttcattttaaagaaattgtatttgttaaatatgtactacaaacttagtagt

SEQ ID NO: 182 - DNA, 11413 bp, Artificial sequence
  Synthetic construct
tggaagggctaattcactcccaaagaagacaagatatccttgatctgtggatctaccacacacaaggctacttccctgattagcagaactacacaccagggccaggggtcagatatccactgacctttggatggtgctacaagctagtaccagttgagccagataaggtagaagaggccaataaaggagagaacaccagcttgttacaccctgtgagcctgcatgggatggatgacccggagagagaagtgttagagtggaggtttgacagccgcctagcatttcatcacgtggcccgagagctgcatccggagtacttcaagaactgctgatatcgagcttgctacaagggactttccgctggggactttccagggaggcgtggcctgggcgggactggggagtggcgagccctcagatcctgcatataagcagctgctttttgcctgtactgggtctctctggttagaccagatctgagcctgggagctctctggctaactagggaacccactgcttaagcctcaataaagcttgccttgagtgcttcaagtagtgtgtgcccgtctgttgtgtgactctggtaactagagatccctcagacccttttagtcagtgtggaaaatctctagcagtggcgcccgaacagggacttgaaagcgaaagggaaaccagaggagctctctcgacgcaggactcggcttgctgaagcgcgcacggcaagaggcgaggggcggcgactggtgagtacgccaaaaattttgactagcggaggctagaaggagagagatgggtgcgagagcgtcagtattaagcgggggagaattagatcgcgatgggaaaaaattcggttaaggccagggggaaagaaaaaatataaattaaaacatatagtatgggcaagcagggagctagaacgattcgcagttaatcctggcctgttagaaacatcagaaggctgtagacaaatactgggacagctacaaccatcccttcagacaggatcagaagaacttagatcattatataatacagtagcaaccctctattgtgtgcatcaaaggatagagataaaagacaccaaggaagctttagacaagatagaggaagagcaaaacaaaagtaagaccaccgcacagcaagcggccggtgatcttcagacctggacgatatatatgagggacaattggagaagtgaattatataaatataaagtagtaaaaattgaaccattaggagtagcacccaccaaggcaaagagaagagtggtgcagagagaaaaaagagcagtgggaataggagctttgttccttgggttcttgggagcagcaggaagcactatgggcgcagcgtcaatgacgctgacggtacaggccagacaattattgtctggtatagtgcagcagcagaacaatttgctgagggctattgaggcgcaacagcatctgttgcaactcacagtctggggcatcaagcagctccaggcaagaatcctggctgtggaaagatacctaaaggatcaacagctcctggggatttggggttgctctggaaaactcatttgcaccactgctgtgccttggaatgctagttggagtaataaatctctggaacagatttggaatcacacgacctggatggagtgggacagagaaattaacaattacacaagcttaatacactccttaattgaagaatcgcaaaaccagcaagaaaagaatgaacaagaattattggaattagataaatgggcaagtttgtggaattggtttaacataacaaattggctgtggtatataaaattattcataatgatagtaggaggcttggtaggtttaagaatagtttttgctgtactttctatagtgaatagagttaggcagggatattcaccattatcgtttcagacccacctcccaaccccgaggggacccgacaggcccgaaggaatagaagaagaaggtggagagagagacagagacagatccattcgattagtgaacggatctcgacggtcgccaaatggcagtattcatccacaattttaaaagaaaaggggggattggggggtacagtgcaggggaaagaatagtagacataatagcaacagacatacaaactaaagaattacaaaaacaaattacaaaaattcaaaattttcgggtttattacagggacagcagagatccagtttggatcgataagcttgatatcgaattgggtaggggaggcgcttttcccaaggcagtctggagcatgcgctttagcagccccgctgggcacttggcgctacacaagtggcctctggcctcgcacacattccacatccaccggtaggcgccaaccggctccgttctttggtggccccttcgcgccaccttctactcctcccctagtcaggaagttcccccccgccccgcagctcgcgtcgtgcaggacgtgacaaatggaagtagcacgtctcactagtctcgtgcagatggacagcaccgctgagcaatggaagcgggtaggcctttggggcagcggccaatagcagctttgctccttcgctttctgggctcagaggctgggaaggggtgggtccgggggcgggctcaggggcgggctcaggggcggggcgggcgcccgaaggtcctccggaggcccggcattctgcacgcttcaaaagcgcacgtctgccgcgctgttctcctcttcctcatctccgggcctttcgaattctcacgcgtcaagtggagcaaggcaggtggacagtggatcatggcgttgcctgtcacggcactgctccttccccttgcacttcttcttcatgcagctcgccccgagcagaaattgatctccgaagaagaccttcaggtccaactgcagcaatcaggtggaggacttgtgaaaccaggagggagtctgaggcttagctgcgcagcgagtgggtttactttctctagttacgccatgcactgggtgcgccaagcccccgggaaaggactggagtgggtcgctgttatttcatatgacgggtcaaataaatactacgccgattcagtaaagggtcgatttactatatctagggacaacagtaagaacacactttatctgcagatggatagcctgcgggcggaggacactgcagtctactattgcgcgaaggaaggagacagctcacgctggagctacgacctctggggaagggggactctcgtaacggtgtcatccggcggtggcggcagcggtggtggtggatcagggggaggggggtctcagtcagcactcacccaacccgcatccgtgtctggtagtccgggccagagtattactatctcctgtactgggacatcctccgacgttgggggctataactacgtcagctggtatcaacagcaccctggtaaggcacccaaggtaatgatctatgatgtgacaaacagacccagcggtgtttctaaccgatttagcggttcaaaatcaggtaacaccgcaagccttaccatatctggtctccaggctgaagacgaagccgactattactgcagcagctataccatagcctctacactggttgtcttcggaggaggcactaagctgactgtgctaaccacgacgccagcgccgcgaccaccaacaccggcgcccaccatcgcgtcgcagcccctgtccctgcgcccagaggcgtgctttatgtacgtggcagccgcggcatttgtacttctgtttttcgtggggtgcggtgtgcttctcagcaagaggaaacggaagcaccggaggaagaagtctagaccaggcgaacgaccgtttcaatgccggatatgtatgaggaacttctcccagcagaccaatctcacgcggcacacccgaacacatacaggagaaaagccattccaatgtcgaatttgtatgcgcaatttttcacagaaggctaacctcggcgttcacctccgcacacatactggttcacagaagccctttcagtgcaggatttgtatgcgcaactttagcgatcactcatctctgaaacgccacactagaacgcatacaggtgagaagcctttccagtgtcgcatctgtatgcggaacttcagccgagcggatatgcttagacgccatttgcgaactcacaccggttctcaaaaaccttttcagtgccgaatttgtatgcgcaacttcagcgagaaacagaacctggcacgccacacgcgcacgcacaccggggaaaaaccgtttcaatgtcgaatctgcatgcgcaattttagcgacccctctaatcttaggaggcatctgcgcacacacttgcgggatgagtttcccaccatggtgtttccttctgggcagatcagccaggcctcggccttggccccggcccctccccaagtcctgccccaggctccagcccctgcccctgctccagccatggtatcagctctggcccaggccccagcccctgtcccagtcctagccccaggccctcctcaggctgtggccccacctgcccccaagcccacccaggctggggaaggaacgctgtcagaggccctgctgcagctgcagtttgatgatgaagacctgggggccttgcttggcaacagcacagacccagctgtgttcacagacctggcatccgtcgacaactccgagtttcagcagctgctgaaccagggcatacctgtggccccccacacaactgagcccatgctgatggagtaccctgaggctataactcgcctagtgacaggggcccagaggccccccgacccagctcctgctccactgggggccccggggctccccaatggcctcctttcaggagatgaagacttctcctccattgcggacatggacttctcagccctgctgagtcagatcagctccagtgggcagggaggaggtggaagcggcttcagcgtggacaccagtgccctgctggacctgttcagcccctcggtgaccgtgcccgacatgagcctgcctgaccttgacagcagcctggccagtatccaagagctcctgtctccccaggagccccccaggcctcccgaggcagagaacagcagcccggattcagggaagcagctggtgcactacacagcgcagccgctgttcctgctggaccccggctccgtggacaccgggagcaacgacctgccggtgctgtttgagctgggagagggctcctacttctccgaaggggacggcttcgccgaggaccccaccatctccctgctgacaggctcggagcctcccaaagccaaggaccccactgtctcctaagcggccgctaatcaacctctggattacaaaatttgtgaaagattgactggtattcttaactatgttgctccttttacgctatgtggatacgctgctttaatgcctttgtatcatgctattgcttcccgtatggctttcattttctcctccttgtataaatcctggttgctgtctctttatgaggagttgtggcccgttgtcaggcaacgtggcgtggtgtgcactgtgtttgctgacgcaacccccactggttggggcattgccaccacctgtcagctcctttccgggactttcgctttccccctccctattgccacggcggaactcatcgccgcctgccttgcccgctgctggacaggggctcggctgttgggcactgacaattccgtggtgttgtcggggaaatcatcgtcctttccttggctgctcgcctgtgttgccacctggattctgcgcgggacgtccttctgctacgtcccttcggccctcaatccagcggaccttccttcccgcggcctgctgccggctctgcggcctcttccgcgtcttcgccttcgccctcagacgagtcggatctccctttgggccgcctccccgcatcgataccgtcgaccgcgagggaattaattcgagctcggtacctttaagaccaatgacttacaaggcagctgtagatcttagccactttttaaaagaaaaggggggactggaagggctaattcactcccaacgaagacaagatctgctttttgcttgtactgggtctctctggttagaccagatctgagcctgggagctctctggctaactagggaacccactgcttaagcctcaataaagcttgccttgagtgcttcaagtagtgtgtgcccgtctgttgtgtgactctggtaactagagatccctcagacccttttagtcagtgtggaaaatctctagcagcatctagaattaattccgtgtattctatagtgtcacctaaatcgtatgtgtatgatacataaggttatgtattaattgtagccgcgttctaacgacaatatgtacaagcctaattgtgtagcatctggcttactgaagcagaccctatcatctctctcgtaaactgccgtcagagtcggtttggttggacgaaccttctgagtttctggtaacgccgtcccgcacccggaaatggtcagcgaaccaatcagcagggtcatcgctagccagatcctctacgccggacgcatcgtggccggcatcaccggcgccacaggtgcggttgctggcgcctatatcgccgacatcaccgatggggaagatcgggctcgccacttcgggctcatgagcgcttgtttcggcgtgggtatggtggcaggccccgtggccgggggactgttgggcgccatctccttgcatgcaccattccttgcggcggcggtgctcaacggcctcaacctactactgggctgcttcctaatgcaggagtcgcataagggagagcgtcgaatggtgcactctcagtacaatctagctctgatgccgcatagttaagccagccccgacacccgccaacacccgctgacgcgccctgacgggcttgtctgctcccggcatccgcttacagacaagctgtgaccgtctccgggagctgcatgtgtcagaggttttcaccgtcatcaccgaaacgcgcgagacgaaagggcctcgtgatacgcctatttttataggttaatgtcatgataataatggtttcttagacgtcaggtggcacttttcggggaaatgtgcgcggaacccctatttgtttatttttctaaatacattcaaatatgtatccgctcatgagacaataaccctgataaatgcttcaataatattgaaaaaggaagagtatgagtattcaacatttccgtgtcgcccttattcccttttttgcggcattttgccttcctgtttttgctcacccagaaacgctggtgaaagtaaaagatgctgaagatcagttgggtgcacgagtgggttacatcgaactggatctcaacagcggtaagatccttgagagttttcgccccgaagaacgttttccaatgatgagcacttttaaagttctgctatgtggcgcggtattatcccgtattgacgccgggcaagagcaactcggtcgccgcatacactattctcagaatgacttggttgagtactcaccagtcacagaaaagcatcttacggatggcatgacagtaagagaattatgcagtgctgccataaccatgagtgataacactgcggccaacttacttctgacaacgatcggaggaccgaaggagctaaccgcttttttgcacaacatgggggatcatgtaactcgccttgatcgttgggaaccggagctgaatgaagccataccaaacgacgagcgtgacaccacgatgcctgtagcaatggcaacaacgttgcgcaaactattaactggcgaactacttactctagcttcccggcaacaattaatagactggatggaggcggataaagttgcaggaccacttctgcgctcggcccttccggctggctggtttattgctgataaatctggagccggtgagcgtgggtctcgcggtatcattgcagcactggggccagatggtaagccctcccgtatcgtagttatctacacgacggggagtcaggcaactatggatgaacgaaatagacagatcgctgagataggtgcctcactgattaagcattggtaactgtcagaccaagtttactcatatatactttagattgatttaaaacttcatttttaatttaaaaggatctaggtgaagatcctttttgataatctcatgaccaaaatcccttaacgtgagttttcgttccactgagcgtcagaccccgtagaaaagatcaaaggatcttcttgagatcctttttttctgcgcgtaatctgctgcttgcaaacaaaaaaaccaccgctaccagcggtggtttgtttgccggatcaagagctaccaactctttttccgaaggtaactggcttcagcagagcgcagataccaaatactgtccttctagtgtagccgtagttaggccaccacttcaagaactctgtagcaccgcctacatacctcgctctgctaatcctgttaccagtggctgctgccagtggcgataagtcgtgtcttaccgggttggactcaagacgatagttaccggataaggcgcagcggtcgggctgaacggggggttcgtgcacacagcccagcttggagcgaacgacctacaccgaactgagatacctacagcgtgagctatgagaaagcgccacgcttcccgaagggagaaaggcggacaggtatccggtaagcggcagggtcggaacaggagagcgcacgagggagcttccagggggaaacgcctggtatctttatagtcctgtcgggtttcgccacctctgacttgagcgtcgatttttgtgatgctcgtcaggggggcggagcctatggaaaaacgccagcaacgcggcctttttacggttcctggccttttgctggccttttgctcacatgttctttcctgcgttatcccctgattctgtggataaccgtattaccgcctttgagtgagctgataccgctcgccgcagccgaacgaccgagcgcagcgagtcagtgagcgaggaagcggaagagcgcccaatacgcaaaccgcctctccccgcgcgttggccgattcattaatgcagctgtggaatgtgtgtcagttagggtgtggaaagtccccaggctccccagcaggcagaagtatgcaaagcatgcatctcaattagtcagcaaccaggtgtggaaagtccccaggctccccagcaggcagaagtatgcaaagcatgcatctcaattagtcagcaaccatagtcccgcccctaactccgcccatcccgcccctaactccgcccagttccgcccattctccgccccatggctgactaattttttttatttatgcagaggccgaggccgcctcggcctctgagctattccagaagtagtgaggaggcttttttggaggcctaggcttttgcaaaaagcttggacacaagacaggcttgcgagatatgtttgagaataccactttatcccgcgtcagggagaggcagtgcgtaaaaagacgcggactcatgtgaaatactggtttttagtgcgccagatctctataatctcgcgcaacctattttcccctcgaacactttttaagccgtagataaacaggctgggacacttcacatgagcgaaaaatacatcgtcacctgggacatgttgcagatccatgcacgtaaactcgcaagccgactgatgccttctgaacaatggaaaggcattattgccgtaagccgtggcggtctgtaccgggtgcgttactggcgcgtgaactgggtattcgtcatgtcgataccgtttgtatttccagctacgatcacgacaaccagcgcgagcttaaagtgctgaaacgcgcagaaggcgatggcgaaggcttcatcgttattgatgacctggtggataccggtggtactgcggttgcgattcgtgaaatgtatccaaaagcgcactttgtcaccatcttcgcaaaaccggctggtcgtccgctggttgatgactatgttgttgatatcccgcaagatacctggattgaacagccgtgggatatgggcgtcgtattcgtcccgccaatctccggtcgctaatcttttcaacgcctggcactgccgggcgttgttctttttaacttcaggcgggttacaatagtttccagtaagtattctggaggctgcatccatgacacaggcaaacctgagcgaaaccctgttcaaaccccgctttaaacatcctgaaacctcgacgctagtccgccgctttaatcacggcgcacaaccgcctgtgcagtcggcccttgatggtaaaaccatccctcactggtatcgcatgattaaccgtctgatgtggatctggcgcggcattgacccacgcgaaatcctcgacgtccaggcacgtattgtgatgagcgatgccgaacgtaccgacgatgatttatacgatacggtgattggctaccgtggcggcaactggatttatgagtgggccccggatctttgtgaaggaaccttacttctgtggtgtgacataattggacaaactacctacagagatttaaagctctaaggtaaatataaaatttttaagtgtataatgtgttaaactactgattctaattgtttgtgtattttagattccaacctatggaactgatgaatgggagcagtggtggaatgcctttaatgaggaaaacctgttttgctcagaagaaatgccatctagtgatgatgaggctactgctgactctcaacattctactcctccaaaaaagaagagaaaggtagaagaccccaaggactttccttcagaattgctaagttttttgagtcatgctgtgtttagtaatagaactcttgcttgctttgctatttacaccacaaaggaaaaagctgcactgctatacaagaaaattatggaaaaatattctgtaacctttataagtaggcataacagttataatcataacatactgttttttcttactccacacaggcatagagtgtctgctattaataactatgctcaaaaattgtgtacctttagctttttaatttgtaaaggggttaataaggaatatttgatgtatagtgccttgactagagatcataatcagccataccacatttgtagaggttttacttgctttaaaaaacctcccacacctccccctgaacctgaaacataaaatgaatgcaattgttgttgttaacttgtttattgcagcttataatggttacaaataaagcaatagcatcacaaatttcacaaataaagcatttttttcactgcattctagttgtggtttgtccaaactcatcaatgtatcttatcatgtctggatcaactggataactcaagctaaccaaaatcatcccaaacttcccaccccataccctattaccactgccaattacctagtggtttcatttactctaaacctgtgattcctctgaattattttcattttaaagaaattgtatttgttaaatatgtactacaaacttagtagt

SEQ ID NO: 183 - DNA, 11215 bp, Artificial sequence
  Synthetic construct
tggaagggctaattcactcccaaagaagacaagatatccttgatctgtggatctaccacacacaaggctacttccctgattagcagaactacacaccagggccaggggtcagatatccactgacctttggatggtgctacaagctagtaccagttgagccagataaggtagaagaggccaataaaggagagaacaccagcttgttacaccctgtgagcctgcatgggatggatgacccggagagagaagtgttagagtggaggtttgacagccgcctagcatttcatcacgtggcccgagagctgcatccggagtacttcaagaactgctgatatcgagcttgctacaagggactttccgctggggactttccagggaggcgtggcctgggcgggactggggagtggcgagccctcagatcctgcatataagcagctgctttttgcctgtactgggtctctctggttagaccagatctgagcctgggagctctctggctaactagggaacccactgcttaagcctcaataaagcttgccttgagtgcttcaagtagtgtgtgcccgtctgttgtgtgactctggtaactagagatccctcagacccttttagtcagtgtggaaaatctctagcagtggcgcccgaacagggacttgaaagcgaaagggaaaccagaggagctctctcgacgcaggactcggcttgctgaagcgcgcacggcaagaggcgaggggcggcgactggtgagtacgccaaaaattttgactagcggaggctagaaggagagagatgggtgcgagagcgtcagtattaagcgggggagaattagatcgcgatgggaaaaaattcggttaaggccagggggaaagaaaaaatataaattaaaacatatagtatgggcaagcagggagctagaacgattcgcagttaatcctggcctgttagaaacatcagaaggctgtagacaaatactgggacagctacaaccatcccttcagacaggatcagaagaacttagatcattatataatacagtagcaaccctctattgtgtgcatcaaaggatagagataaaagacaccaaggaagctttagacaagatagaggaagagcaaaacaaaagtaagaccaccgcacagcaagcggccggtgatcttcagacctggacgatatatatgagggacaattggagaagtgaattatataaatataaagtagtaaaaattgaaccattaggagtagcacccaccaaggcaaagagaagagtggtgcagagagaaaaaagagcagtgggaataggagctttgttccttgggttcttgggagcagcaggaagcactatgggcgcagcgtcaatgacgctgacggtacaggccagacaattattgtctggtatagtgcagcagcagaacaatttgctgagggctattgaggcgcaacagcatctgttgcaactcacagtctggggcatcaagcagctccaggcaagaatcctggctgtggaaagatacctaaaggatcaacagctcctggggatttggggttgctctggaaaactcatttgcaccactgctgtgccttggaatgctagttggagtaataaatctctggaacagatttggaatcacacgacctggatggagtgggacagagaaattaacaattacacaagcttaatacactccttaattgaagaatcgcaaaaccagcaagaaaagaatgaacaagaattattggaattagataaatgggcaagtttgtggaattggtttaacataacaaattggctgtggtatataaaattattcataatgatagtaggaggcttggtaggtttaagaatagtttttgctgtactttctatagtgaatagagttaggcagggatattcaccattatcgtttcagacccacctcccaaccccgaggggacccgacaggcccgaaggaatagaagaagaaggtggagagagagacagagacagatccattcgattagtgaacggatctcgacggtcgccaaatggcagtattcatccacaattttaaaagaaaaggggggattggggggtacagtgcaggggaaagaatagtagacataatagcaacagacatacaaactaaagaattacaaaaacaaattacaaaaattcaaaattttcgggtttattacagggacagcagagatccagtttggatcgataagcttgatatcgaattgggtaggggaggcgcttttcccaaggcagtctggagcatgcgctttagcagccccgctgggcacttggcgctacacaagtggcctctggcctcgcacacattccacatccaccggtaggcgccaaccggctccgttctttggtggccccttcgcgccaccttctactcctcccctagtcaggaagttcccccccgccccgcagctcgcgtcgtgcaggacgtgacaaatggaagtagcacgtctcactagtctcgtgcagatggacagcaccgctgagcaatggaagcgggtaggcctttggggcagcggccaatagcagctttgctccttcgctttctgggctcagaggctgggaaggggtgggtccgggggcgggctcaggggcgggctcaggggcggggcgggcgcccgaaggtcctccggaggcccggcattctgcacgcttcaaaagcgcacgtctgccgcgctgttctcctcttcctcatctccgggcctttcgaattctcacgcgtcaagtggagcaaggcaggtggacagtggatcatggcgttgcctgtcacggcactgctccttccccttgcacttcttcttcatgcagctcgccccgagcagaaattgatctccgaagaagaccttcaggtccaactgcagcaatcaggtggaggacttgtgaaaccaggagggagtctgaggcttagctgcgcagcgagtgggtttactttctctagttacgccatgcactgggtgcgccaagcccccgggaaaggactggagtgggtcgctgttatttcatatgacgggtcaaataaatactacgccgattcagtaaagggtcgatttactatatctagggacaacagtaagaacacactttatctgcagatggatagcctgcgggcggaggacactgcagtctactattgcgcgaaggaaggagacagctcacgctggagctacgacctctggggaagggggactctcgtaacggtgtcatccggcggtggcggcagcggtggtggtggatcagggggaggggggtctcagtcagcactcacccaacccgcatccgtgtctggtagtccgggccagagtattactatctcctgtactgggacatcctccgacgttgggggctataactacgtcagctggtatcaacagcaccctggtaaggcacccaaggtaatgatctatgatgtgacaaacagacccagcggtgtttctaaccgatttagcggttcaaaatcaggtaacaccgcaagccttaccatatctggtctccaggctgaagacgaagccgactattactgcagcagctataccatagcctctacactggttgtcttcggaggaggcactaagctgactgtgctaaccacgacgccagcgccgcgaccaccaacaccggcgcccaccatcgcgtcgcagcccctgtccctgcgcccagaggcgtgctttatgtacgtggcagccgcggcatttgtacttctgtttttcgtggggtgcggtgtgcttctcagcaagaggaaacggaagcaccggaggaagaagtctagaccaggcgaacgaccgtttcaatgccggatatgtatgaggaacttctcccagcagaccaatctcacgcggcacacccgaacacatacaggagaaaagccattccaatgtcgaatttgtatgcgcaatttttcacagaaggctaacctcggcgttcacctccgcacacatactggttcacagaagccctttcagtgcaggatttgtatgcgcaactttagcgatcactcatctctgaaacgccacactagaacgcatacaggtgagaagcctttccagtgtcgcatctgtatgcggaacttcagccgagcggatatgcttagacgccatttgcgaactcacaccggttctcaaaaaccttttcagtgccgaatttgtatgcgcaacttcagcgagaaacagaacctggcacgccacacgcgcacgcacaccggggaaaaaccgtttcaatgtcgaatctgcatgcgcaattttagcgacccctctaatcttaggaggcatctgcgcacacacttgcgggatgagtttcccaccatggtgtttccttctgggcagatcagccaggcctcggccttggccccggcccctccccaagtcctgccccaggctccagcccctgcccctgctccagccatggtatcagctctggcccaggccccagcccctgtcccagtcctagccccaggccctcctcaggctgtggccccacctgcccccaagcccacccaggctggggaaggaacgctgtcagaggccctgctgcagctgcagtttgatgatgaagacctgggggccttgcttggcaacagcacagacccagctgtgttcacagacctggcatccgtcgacaactccgagtttcagcagctgctgaaccagggcatacctgtggccccccacacaactgagcccatgctgatggagtaccctgaggctataactcgcctagtgacaggggcccagaggccccccgacccagctcctgctccactgggggccccggggctccccaatggcctcctttcaggagatgaagacttctcctccattgcggacatggacttctcagccctgctgagtcagatcagctccagtgggcagggaggaggtggaagcgaccaaagcacctttgacattttgcaggatttggagttttcttctgggtccccaggtaaagagacgaatgagagtccttggagatcagacctgttgatagatgaaaactgtttgctttctcctctggcgggagaagacgattcattccttttggaaggaaactcgaatgaggactaagcggccgctaatcaacctctggattacaaaatttgtgaaagattgactggtattcttaactatgttgctccttttacgctatgtggatacgctgctttaatgcctttgtatcatgctattgcttcccgtatggctttcattttctcctccttgtataaatcctggttgctgtctctttatgaggagttgtggcccgttgtcaggcaacgtggcgtggtgtgcactgtgtttgctgacgcaacccccactggttggggcattgccaccacctgtcagctcctttccgggactttcgctttccccctccctattgccacggcggaactcatcgccgcctgccttgcccgctgctggacaggggctcggctgttgggcactgacaattccgtggtgttgtcggggaaatcatcgtcctttccttggctgctcgcctgtgttgccacctggattctgcgcgggacgtccttctgctacgtcccttcggccctcaatccagcggaccttccttcccgcggcctgctgccggctctgcggcctcttccgcgtcttcgccttcgccctcagacgagtcggatctccctttgggccgcctccccgcatcgataccgtcgaccgcgagggaattaattcgagctcggtacctttaagaccaatgacttacaaggcagctgtagatcttagccactttttaaaagaaaaggggggactggaagggctaattcactcccaacgaagacaagatctgctttttgcttgtactgggtctctctggttagaccagatctgagcctgggagctctctggctaactagggaacccactgcttaagcctcaataaagcttgccttgagtgcttcaagtagtgtgtgcccgtctgttgtgtgactctggtaactagagatccctcagacccttttagtcagtgtggaaaatctctagcagcatctagaattaattccgtgtattctatagtgtcacctaaatcgtatgtgtatgatacataaggttatgtattaattgtagccgcgttctaacgacaatatgtacaagcctaattgtgtagcatctggcttactgaagcagaccctatcatctctctcgtaaactgccgtcagagtcggtttggttggacgaaccttctgagtttctggtaacgccgtcccgcacccggaaatggtcagcgaaccaatcagcagggtcatcgctagccagatcctctacgccggacgcatcgtggccggcatcaccggcgccacaggtgcggttgctggcgcctatatcgccgacatcaccgatggggaagatcgggctcgccacttcgggctcatgagcgcttgtttcggcgtgggtatggtggcaggccccgtggccgggggactgttgggcgccatctccttgcatgcaccattccttgcggcggcggtgctcaacggcctcaacctactactgggctgcttcctaatgcaggagtcgcataagggagagcgtcgaatggtgcactctcagtacaatctagctctgatgccgcatagttaagccagccccgacacccgccaacacccgctgacgcgccctgacgggcttgtctgctcccggcatccgcttacagacaagctgtgaccgtctccgggagctgcatgtgtcagaggttttcaccgtcatcaccgaaacgcgcgagacgaaagggcctcgtgatacgcctatttttataggttaatgtcatgataataatggtttcttagacgtcaggtggcacttttcggggaaatgtgcgcggaacccctatttgtttatttttctaaatacattcaaatatgtatccgctcatgagacaataaccctgataaatgcttcaataatattgaaaaaggaagagtatgagtattcaacatttccgtgtcgcccttattcccttttttgcggcattttgccttcctgtttttgctcacccagaaacgctggtgaaagtaaaagatgctgaagatcagttgggtgcacgagtgggttacatcgaactggatctcaacagcggtaagatccttgagagttttcgccccgaagaacgttttccaatgatgagcacttttaaagttctgctatgtggcgcggtattatcccgtattgacgccgggcaagagcaactcggtcgccgcatacactattctcagaatgacttggttgagtactcaccagtcacagaaaagcatcttacggatggcatgacagtaagagaattatgcagtgctgccataaccatgagtgataacactgcggccaacttacttctgacaacgatcggaggaccgaaggagctaaccgcttttttgcacaacatgggggatcatgtaactcgccttgatcgttgggaaccggagctgaatgaagccataccaaacgacgagcgtgacaccacgatgcctgtagcaatggcaacaacgttgcgcaaactattaactggcgaactacttactctagcttcccggcaacaattaatagactggatggaggcggataaagttgcaggaccacttctgcgctcggcccttccggctggctggtttattgctgataaatctggagccggtgagcgtgggtctcgcggtatcattgcagcactggggccagatggtaagccctcccgtatcgtagttatctacacgacggggagtcaggcaactatggatgaacgaaatagacagatcgctgagataggtgcctcactgattaagcattggtaactgtcagaccaagtttactcatatatactttagattgatttaaaacttcatttttaatttaaaaggatctaggtgaagatcctttttgataatctcatgaccaaaatcccttaacgtgagttttcgttccactgagcgtcagaccccgtagaaaagatcaaaggatcttcttgagatcctttttttctgcgcgtaatctgctgcttgcaaacaaaaaaaccaccgctaccagcggtggtttgtttgccggatcaagagctaccaactctttttccgaaggtaactggcttcagcagagcgcagataccaaatactgtccttctagtgtagccgtagttaggccaccacttcaagaactctgtagcaccgcctacatacctcgctctgctaatcctgttaccagtggctgctgccagtggcgataagtcgtgtcttaccgggttggactcaagacgatagttaccggataaggcgcagcggtcgggctgaacggggggttcgtgcacacagcccagcttggagcgaacgacctacaccgaactgagatacctacagcgtgagctatgagaaagcgccacgcttcccgaagggagaaaggcggacaggtatccggtaagcggcagggtcggaacaggagagcgcacgagggagcttccagggggaaacgcctggtatctttatagtcctgtcgggtttcgccacctctgacttgagcgtcgatttttgtgatgctcgtcaggggggcggagcctatggaaaaacgccagcaacgcggcctttttacggttcctggccttttgctggccttttgctcacatgttctttcctgcgttatcccctgattctgtggataaccgtattaccgcctttgagtgagctgataccgctcgccgcagccgaacgaccgagcgcagcgagtcagtgagcgaggaagcggaagagcgcccaatacgcaaaccgcctctccccgcgcgttggccgattcattaatgcagctgtggaatgtgtgtcagttagggtgtggaaagtccccaggctccccagcaggcagaagtatgcaaagcatgcatctcaattagtcagcaaccaggtgtggaaagtccccaggctccccagcaggcagaagtatgcaaagcatgcatctcaattagtcagcaaccatagtcccgcccctaactccgcccatcccgcccctaactccgcccagttccgcccattctccgccccatggctgactaattttttttatttatgcagaggccgaggccgcctcggcctctgagctattccagaagtagtgaggaggcttttttggaggcctaggcttttgcaaaaagcttggacacaagacaggcttgcgagatatgtttgagaataccactttatcccgcgtcagggagaggcagtgcgtaaaaagacgcggactcatgtgaaatactggtttttagtgcgccagatctctataatctcgcgcaacctattttcccctcgaacactttttaagccgtagataaacaggctgggacacttcacatgagcgaaaaatacatcgtcacctgggacatgttgcagatccatgcacgtaaactcgcaagccgactgatgccttctgaacaatggaaaggcattattgccgtaagccgtggcggtctgtaccgggtgcgttactggcgcgtgaactgggtattcgtcatgtcgataccgtttgtatttccagctacgatcacgacaaccagcgcgagcttaaagtgctgaaacgcgcagaaggcgatggcgaaggcttcatcgttattgatgacctggtggataccggtggtactgcggttgcgattcgtgaaatgtatccaaaagcgcactttgtcaccatcttcgcaaaaccggctggtcgtccgctggttgatgactatgttgttgatatcccgcaagatacctggattgaacagccgtgggatatgggcgtcgtattcgtcccgccaatctccggtcgctaatcttttcaacgcctggcactgccgggcgttgttctttttaacttcaggcgggttacaatagtttccagtaagtattctggaggctgcatccatgacacaggcaaacctgagcgaaaccctgttcaaaccccgctttaaacatcctgaaacctcgacgctagtccgccgctttaatcacggcgcacaaccgcctgtgcagtcggcccttgatggtaaaaccatccctcactggtatcgcatgattaaccgtctgatgtggatctggcgcggcattgacccacgcgaaatcctcgacgtccaggcacgtattgtgatgagcgatgccgaacgtaccgacgatgatttatacgatacggtgattggctaccgtggcggcaactggatttatgagtgggccccggatctttgtgaaggaaccttacttctgtggtgtgacataattggacaaactacctacagagatttaaagctctaaggtaaatataaaatttttaagtgtataatgtgttaaactactgattctaattgtttgtgtattttagattccaacctatggaactgatgaatgggagcagtggtggaatgcctttaatgaggaaaacctgttttgctcagaagaaatgccatctagtgatgatgaggctactgctgactctcaacattctactcctccaaaaaagaagagaaaggtagaagaccccaaggactttccttcagaattgctaagttttttgagtcatgctgtgtttagtaatagaactcttgcttgctttgctatttacaccacaaaggaaaaagctgcactgctatacaagaaaattatggaaaaatattctgtaacctttataagtaggcataacagttataatcataacatactgttttttcttactccacacaggcatagagtgtctgctattaataactatgctcaaaaattgtgtacctttagctttttaatttgtaaaggggttaataaggaatatttgatgtatagtgccttgactagagatcataatcagccataccacatttgtagaggttttacttgctttaaaaaacctcccacacctccccctgaacctgaaacataaaatgaatgcaattgttgttgttaacttgtttattgcagcttataatggttacaaataaagcaatagcatcacaaatttcacaaataaagcatttttttcactgcattctagttgtggtttgtccaaactcatcaatgtatcttatcatgtctggatcaactggataactcaagctaaccaaaatcatcccaaacttcccaccccataccctattaccactgccaattacctagtggtttcatttactctaaacctgtgattcctctgaattattttcattttaaagaaattgtatttgttaaatatgtactacaaacttagtagt

SEQ ID NO: 184 - DNA, 11026 bp, Artificial sequence
  Synthetic construct
tggaagggctaattcactcccaaagaagacaagatatccttgatctgtggatctaccacacacaaggctacttccctgattagcagaactacacaccagggccaggggtcagatatccactgacctttggatggtgctacaagctagtaccagttgagccagataaggtagaagaggccaataaaggagagaacaccagcttgttacaccctgtgagcctgcatgggatggatgacccggagagagaagtgttagagtggaggtttgacagccgcctagcatttcatcacgtggcccgagagctgcatccggagtacttcaagaactgctgatatcgagcttgctacaagggactttccgctggggactttccagggaggcgtggcctgggcgggactggggagtggcgagccctcagatcctgcatataagcagctgctttttgcctgtactgggtctctctggttagaccagatctgagcctgggagctctctggctaactagggaacccactgcttaagcctcaataaagcttgccttgagtgcttcaagtagtgtgtgcccgtctgttgtgtgactctggtaactagagatccctcagacccttttagtcagtgtggaaaatctctagcagtggcgcccgaacagggacttgaaagcgaaagggaaaccagaggagctctctcgacgcaggactcggcttgctgaagcgcgcacggcaagaggcgaggggcggcgactggtgagtacgccaaaaattttgactagcggaggctagaaggagagagatgggtgcgagagcgtcagtattaagcgggggagaattagatcgcgatgggaaaaaattcggttaaggccagggggaaagaaaaaatataaattaaaacatatagtatgggcaagcagggagctagaacgattcgcagttaatcctggcctgttagaaacatcagaaggctgtagacaaatactgggacagctacaaccatcccttcagacaggatcagaagaacttagatcattatataatacagtagcaaccctctattgtgtgcatcaaaggatagagataaaagacaccaaggaagctttagacaagatagaggaagagcaaaacaaaagtaagaccaccgcacagcaagcggccggtgatcttcagacctggacgatatatatgagggacaattggagaagtgaattatataaatataaagtagtaaaaattgaaccattaggagtagcacccaccaaggcaaagagaagagtggtgcagagagaaaaaagagcagtgggaataggagctttgttccttgggttcttgggagcagcaggaagcactatgggcgcagcgtcaatgacgctgacggtacaggccagacaattattgtctggtatagtgcagcagcagaacaatttgctgagggctattgaggcgcaacagcatctgttgcaactcacagtctggggcatcaagcagctccaggcaagaatcctggctgtggaaagatacctaaaggatcaacagctcctggggatttggggttgctctggaaaactcatttgcaccactgctgtgccttggaatgctagttggagtaataaatctctggaacagatttggaatcacacgacctggatggagtgggacagagaaattaacaattacacaagcttaatacactccttaattgaagaatcgcaaaaccagcaagaaaagaatgaacaagaattattggaattagataaatgggcaagtttgtggaattggtttaacataacaaattggctgtggtatataaaattattcataatgatagtaggaggcttggtaggtttaagaatagtttttgctgtactttctatagtgaatagagttaggcagggatattcaccattatcgtttcagacccacctcccaaccccgaggggacccgacaggcccgaaggaatagaagaagaaggtggagagagagacagagacagatccattcgattagtgaacggatctcgacggtcgccaaatggcagtattcatccacaattttaaaagaaaaggggggattggggggtacagtgcaggggaaagaatagtagacataatagcaacagacatacaaactaaagaattacaaaaacaaattacaaaaattcaaaattttcgggtttattacagggacagcagagatccagtttggatcgataagcttgatatcgaattgggtaggggaggcgcttttcccaaggcagtctggagcatgcgctttagcagccccgctgggcacttggcgctacacaagtggcctctggcctcgcacacattccacatccaccggtaggcgccaaccggctccgttctttggtggccccttcgcgccaccttctactcctcccctagtcaggaagttcccccccgccccgcagctcgcgtcgtgcaggacgtgacaaatggaagtagcacgtctcactagtctcgtgcagatggacagcaccgctgagcaatggaagcgggtaggcctttggggcagcggccaatagcagctttgctccttcgctttctgggctcagaggctgggaaggggtgggtccgggggcgggctcaggggcgggctcaggggcggggcgggcgcccgaaggtcctccggaggcccggcattctgcacgcttcaaaagcgcacgtctgccgcgctgttctcctcttcctcatctccgggcctttcgaattctcacgcgtcaagtggagcaaggcaggtggacagtggatcatggcgttgcctgtcacggcactgctccttccccttgcacttcttcttcatgcagctcgccccgagcagaaattgatctccgaagaagaccttcaggtccaactgcagcaatcaggtggaggacttgtgaaaccaggagggagtctgaggcttagctgcgcagcgagtgggtttactttctctagttacgccatgcactgggtgcgccaagcccccgggaaaggactggagtgggtcgctgttatttcatatgacgggtcaaataaatactacgccgattcagtaaagggtcgatttactatatctagggacaacagtaagaacacactttatctgcagatggatagcctgcgggcggaggacactgcagtctactattgcgcgaaggaaggagacagctcacgctggagctacgacctctggggaagggggactctcgtaacggtgtcatccggcggtggcggcagcggtggtggtggatcagggggaggggggtctcagtcagcactcacccaacccgcatccgtgtctggtagtccgggccagagtattactatctcctgtactgggacatcctccgacgttgggggctataactacgtcagctggtatcaacagcaccctggtaaggcacccaaggtaatgatctatgatgtgacaaacagacccagcggtgtttctaaccgatttagcggttcaaaatcaggtaacaccgcaagccttaccatatctggtctccaggctgaagacgaagccgactattactgcagcagctataccatagcctctacactggttgtcttcggaggaggcactaagctgactgtgctaaccacgacgccagcgccgcgaccaccaacaccggcgcccaccatcgcgtcgcagcccctgtccctgcgcccagaggcgtgctttatgtacgtggcagccgcggcatttgtacttctgtttttcgtggggtgcggtgtgcttctcagcaagaggaaacggaagcaccccaagaaaaagaggaaggtgtctagacccggagagcgcccattccagtgtcggatttgcatgcggaacttttcgagaagacacggcctggacagacatacccgtactcatacaggtgaaaaaccctttcagtgtcggatctgtatgcgaaatttctccgaccacagcagcctgaagagacatctacgtacccacaccggcagccagaagccatttcagtgtcggatctgtatgcggaacttctccgtgagacacaacctgaccagacatctacgtacgcacaccggagagaagccattccaatgccgaatatgcatgcgcaacttcagtgaccacagcaacctgagcagacacctaaaaacccacaccggttcccagaagccatttcagtgtcggatctgtatgcggaacttctcccagcgcagcagcctggtgagacatctacgtacgcacaccggagagaagccattccaatgccgaatatgcatgcgcaacttcagtgagagcggccacctgaagagacacctgcgtacgcacctgagggatgagtttcccaccatggtgtttccttctgggcagatcagccaggcctcggccttggccccggcccctccccaagtcctgccccaggctccagcccctgcccctgctccagccatggtatcagctctggcccaggccccagcccctgtcccagtcctagccccaggccctcctcaggctgtggccccacctgcccccaagcccacccaggctggggaaggaacgctgtcagaggccctgctgcagctgcagtttgatgatgaagacctgggggccttgcttggcaacagcacagacccagctgtgttcacagacctggcatccgtcgacaactccgagtttcagcagctgctgaaccagggcatacctgtggccccccacacaactgagcccatgctgatggagtaccctgaggctataactcgcctagtgacaggggcccagaggccccccgacccagctcctgctccactgggggccccggggctccccaatggcctcctttcaggagatgaagacttctcctccattgcggacatggacttctcagccctgctgagtcagatcagctcctaagcggccgctaatcaacctctggattacaaaatttgtgaaagattgactggtattcttaactatgttgctccttttacgctatgtggatacgctgctttaatgcctttgtatcatgctattgcttcccgtatggctttcattttctcctccttgtataaatcctggttgctgtctctttatgaggagttgtggcccgttgtcaggcaacgtggcgtggtgtgcactgtgtttgctgacgcaacccccactggttggggcattgccaccacctgtcagctcctttccgggactttcgctttccccctccctattgccacggcggaactcatcgccgcctgccttgcccgctgctggacaggggctcggctgttgggcactgacaattccgtggtgttgtcggggaaatcatcgtcctttccttggctgctcgcctgtgttgccacctggattctgcgcgggacgtccttctgctacgtcccttcggccctcaatccagcggaccttccttcccgcggcctgctgccggctctgcggcctcttccgcgtcttcgccttcgccctcagacgagtcggatctccctttgggccgcctccccgcatcgataccgtcgaccgcgagggaattaattcgagctcggtacctttaagaccaatgacttacaaggcagctgtagatcttagccactttttaaaagaaaaggggggactggaagggctaattcactcccaacgaagacaagatctgctttttgcttgtactgggtctctctggttagaccagatctgagcctgggagctctctggctaactagggaacccactgcttaagcctcaataaagcttgccttgagtgcttcaagtagtgtgtgcccgtctgttgtgtgactctggtaactagagatccctcagacccttttagtcagtgtggaaaatctctagcagcatctagaattaattccgtgtattctatagtgtcacctaaatcgtatgtgtatgatacataaggttatgtattaattgtagccgcgttctaacgacaatatgtacaagcctaattgtgtagcatctggcttactgaagcagaccctatcatctctctcgtaaactgccgtcagagtcggtttggttggacgaaccttctgagtttctggtaacgccgtcccgcacccggaaatggtcagcgaaccaatcagcagggtcatcgctagccagatcctctacgccggacgcatcgtggccggcatcaccggcgccacaggtgcggttgctggcgcctatatcgccgacatcaccgatggggaagatcgggctcgccacttcgggctcatgagcgcttgtttcggcgtgggtatggtggcaggccccgtggccgggggactgttgggcgccatctccttgcatgcaccattccttgcggcggcggtgctcaacggcctcaacctactactgggctgcttcctaatgcaggagtcgcataagggagagcgtcgaatggtgcactctcagtacaatctagctctgatgccgcatagttaagccagccccgacacccgccaacacccgctgacgcgccctgacgggcttgtctgctcccggcatccgcttacagacaagctgtgaccgtctccgggagctgcatgtgtcagaggttttcaccgtcatcaccgaaacgcgcgagacgaaagggcctcgtgatacgcctatttttataggttaatgtcatgataataatggtttcttagacgtcaggtggcacttttcggggaaatgtgcgcggaacccctatttgtttatttttctaaatacattcaaatatgtatccgctcatgagacaataaccctgataaatgcttcaataatattgaaaaaggaagagtatgagtattcaacatttccgtgtcgcccttattcccttttttgcggcattttgccttcctgtttttgctcacccagaaacgctggtgaaagtaaaagatgctgaagatcagttgggtgcacgagtgggttacatcgaactggatctcaacagcggtaagatccttgagagttttcgccccgaagaacgttttccaatgatgagcacttttaaagttctgctatgtggcgcggtattatcccgtattgacgccgggcaagagcaactcggtcgccgcatacactattctcagaatgacttggttgagtactcaccagtcacagaaaagcatcttacggatggcatgacagtaagagaattatgcagtgctgccataaccatgagtgataacactgcggccaacttacttctgacaacgatcggaggaccgaaggagctaaccgcttttttgcacaacatgggggatcatgtaactcgccttgatcgttgggaaccggagctgaatgaagccataccaaacgacgagcgtgacaccacgatgcctgtagcaatggcaacaacgttgcgcaaactattaactggcgaactacttactctagcttcccggcaacaattaatagactggatggaggcggataaagttgcaggaccacttctgcgctcggcccttccggctggctggtttattgctgataaatctggagccggtgagcgtgggtctcgcggtatcattgcagcactggggccagatggtaagccctcccgtatcgtagttatctacacgacggggagtcaggcaactatggatgaacgaaatagacagatcgctgagataggtgcctcactgattaagcattggtaactgtcagaccaagtttactcatatatactttagattgatttaaaacttcatttttaatttaaaaggatctaggtgaagatcctttttgataatctcatgaccaaaatcccttaacgtgagttttcgttccactgagcgtcagaccccgtagaaaagatcaaaggatcttcttgagatcctttttttctgcgcgtaatctgctgcttgcaaacaaaaaaaccaccgctaccagcggtggtttgtttgccggatcaagagctaccaactctttttccgaaggtaactggcttcagcagagcgcagataccaaatactgtccttctagtgtagccgtagttaggccaccacttcaagaactctgtagcaccgcctacatacctcgctctgctaatcctgttaccagtggctgctgccagtggcgataagtcgtgtcttaccgggttggactcaagacgatagttaccggataaggcgcagcggtcgggctgaacggggggttcgtgcacacagcccagcttggagcgaacgacctacaccgaactgagatacctacagcgtgagctatgagaaagcgccacgcttcccgaagggagaaaggcggacaggtatccggtaagcggcagggtcggaacaggagagcgcacgagggagcttccagggggaaacgcctggtatctttatagtcctgtcgggtttcgccacctctgacttgagcgtcgatttttgtgatgctcgtcaggggggcggagcctatggaaaaacgccagcaacgcggcctttttacggttcctggccttttgctggccttttgctcacatgttctttcctgcgttatcccctgattctgtggataaccgtattaccgcctttgagtgagctgataccgctcgccgcagccgaacgaccgagcgcagcgagtcagtgagcgaggaagcggaagagcgcccaatacgcaaaccgcctctccccgcgcgttggccgattcattaatgcagctgtggaatgtgtgtcagttagggtgtggaaagtccccaggctccccagcaggcagaagtatgcaaagcatgcatctcaattagtcagcaaccaggtgtggaaagtccccaggctccccagcaggcagaagtatgcaaagcatgcatctcaattagtcagcaaccatagtcccgcccctaactccgcccatcccgcccctaactccgcccagttccgcccattctccgccccatggctgactaattttttttatttatgcagaggccgaggccgcctcggcctctgagctattccagaagtagtgaggaggcttttttggaggcctaggcttttgcaaaaagcttggacacaagacaggcttgcgagatatgtttgagaataccactttatcccgcgtcagggagaggcagtgcgtaaaaagacgcggactcatgtgaaatactggtttttagtgcgccagatctctataatctcgcgcaacctattttcccctcgaacactttttaagccgtagataaacaggctgggacacttcacatgagcgaaaaatacatcgtcacctgggacatgttgcagatccatgcacgtaaactcgcaagccgactgatgccttctgaacaatggaaaggcattattgccgtaagccgtggcggtctgtaccgggtgcgttactggcgcgtgaactgggtattcgtcatgtcgataccgtttgtatttccagctacgatcacgacaaccagcgcgagcttaaagtgctgaaacgcgcagaaggcgatggcgaaggcttcatcgttattgatgacctggtggataccggtggtactgcggttgcgattcgtgaaatgtatccaaaagcgcactttgtcaccatcttcgcaaaaccggctggtcgtccgctggttgatgactatgttgttgatatcccgcaagatacctggattgaacagccgtgggatatgggcgtcgtattcgtcccgccaatctccggtcgctaatcttttcaacgcctggcactgccgggcgttgttctttttaacttcaggcgggttacaatagtttccagtaagtattctggaggctgcatccatgacacaggcaaacctgagcgaaaccctgttcaaaccccgctttaaacatcctgaaacctcgacgctagtccgccgctttaatcacggcgcacaaccgcctgtgcagtcggcccttgatggtaaaaccatccctcactggtatcgcatgattaaccgtctgatgtggatctggcgcggcattgacccacgcgaaatcctcgacgtccaggcacgtattgtgatgagcgatgccgaacgtaccgacgatgatttatacgatacggtgattggctaccgtggcggcaactggatttatgagtgggccccggatctttgtgaaggaaccttacttctgtggtgtgacataattggacaaactacctacagagatttaaagctctaaggtaaatataaaatttttaagtgtataatgtgttaaactactgattctaattgtttgtgtattttagattccaacctatggaactgatgaatgggagcagtggtggaatgcctttaatgaggaaaacctgttttgctcagaagaaatgccatctagtgatgatgaggctactgctgactctcaacattctactcctccaaaaaagaagagaaaggtagaagaccccaaggactttccttcagaattgctaagttttttgagtcatgctgtgtttagtaatagaactcttgcttgctttgctatttacaccacaaaggaaaaagctgcactgctatacaagaaaattatggaaaaatattctgtaacctttataagtaggcataacagttataatcataacatactgttttttcttactccacacaggcatagagtgtctgctattaataactatgctcaaaaattgtgtacctttagctttttaatttgtaaaggggttaataaggaatatttgatgtatagtgccttgactagagatcataatcagccataccacatttgtagaggttttacttgctttaaaaaacctcccacacctccccctgaacctgaaacataaaatgaatgcaattgttgttgttaacttgtttattgcagcttataatggttacaaataaagcaatagcatcacaaatttcacaaataaagcatttttttcactgcattctagttgtggtttgtccaaactcatcaatgtatcttatcatgtctggatcaactggataactcaagctaaccaaaatcatcccaaacttcccaccccataccctattaccactgccaattacctagtggtttcatttactctaaacctgtgattcctctgaattattttcattttaaagaaattgtatttgttaaatatgtactacaaacttagtagt

SEQ ID NO: 185 - DNA, 11422 bp, Artificial sequence
  Synthetic construct
tggaagggctaattcactcccaaagaagacaagatatccttgatctgtggatctaccacacacaaggctacttccctgattagcagaactacacaccagggccaggggtcagatatccactgacctttggatggtgctacaagctagtaccagttgagccagataaggtagaagaggccaataaaggagagaacaccagcttgttacaccctgtgagcctgcatgggatggatgacccggagagagaagtgttagagtggaggtttgacagccgcctagcatttcatcacgtggcccgagagctgcatccggagtacttcaagaactgctgatatcgagcttgctacaagggactttccgctggggactttccagggaggcgtggcctgggcgggactggggagtggcgagccctcagatcctgcatataagcagctgctttttgcctgtactgggtctctctggttagaccagatctgagcctgggagctctctggctaactagggaacccactgcttaagcctcaataaagcttgccttgagtgcttcaagtagtgtgtgcccgtctgttgtgtgactctggtaactagagatccctcagacccttttagtcagtgtggaaaatctctagcagtggcgcccgaacagggacttgaaagcgaaagggaaaccagaggagctctctcgacgcaggactcggcttgctgaagcgcgcacggcaagaggcgaggggcggcgactggtgagtacgccaaaaattttgactagcggaggctagaaggagagagatgggtgcgagagcgtcagtattaagcgggggagaattagatcgcgatgggaaaaaattcggttaaggccagggggaaagaaaaaatataaattaaaacatatagtatgggcaagcagggagctagaacgattcgcagttaatcctggcctgttagaaacatcagaaggctgtagacaaatactgggacagctacaaccatcccttcagacaggatcagaagaacttagatcattatataatacagtagcaaccctctattgtgtgcatcaaaggatagagataaaagacaccaaggaagctttagacaagatagaggaagagcaaaacaaaagtaagaccaccgcacagcaagcggccggtgatcttcagacctggacgatatatatgagggacaattggagaagtgaattatataaatataaagtagtaaaaattgaaccattaggagtagcacccaccaaggcaaagagaagagtggtgcagagagaaaaaagagcagtgggaataggagctttgttccttgggttcttgggagcagcaggaagcactatgggcgcagcgtcaatgacgctgacggtacaggccagacaattattgtctggtatagtgcagcagcagaacaatttgctgagggctattgaggcgcaacagcatctgttgcaactcacagtctggggcatcaagcagctccaggcaagaatcctggctgtggaaagatacctaaaggatcaacagctcctggggatttggggttgctctggaaaactcatttgcaccactgctgtgccttggaatgctagttggagtaataaatctctggaacagatttggaatcacacgacctggatggagtgggacagagaaattaacaattacacaagcttaatacactccttaattgaagaatcgcaaaaccagcaagaaaagaatgaacaagaattattggaattagataaatgggcaagtttgtggaattggtttaacataacaaattggctgtggtatataaaattattcataatgatagtaggaggcttggtaggtttaagaatagtttttgctgtactttctatagtgaatagagttaggcagggatattcaccattatcgtttcagacccacctcccaaccccgaggggacccgacaggcccgaaggaatagaagaagaaggtggagagagagacagagacagatccattcgattagtgaacggatctcgacggtcgccaaatggcagtattcatccacaattttaaaagaaaaggggggattggggggtacagtgcaggggaaagaatagtagacataatagcaacagacatacaaactaaagaattacaaaaacaaattacaaaaattcaaaattttcgggtttattacagggacagcagagatccagtttggatcgataagcttgatatcgaattgggtaggggaggcgcttttcccaaggcagtctggagcatgcgctttagcagccccgctgggcacttggcgctacacaagtggcctctggcctcgcacacattccacatccaccggtaggcgccaaccggctccgttctttggtggccccttcgcgccaccttctactcctcccctagtcaggaagttcccccccgccccgcagctcgcgtcgtgcaggacgtgacaaatggaagtagcacgtctcactagtctcgtgcagatggacagcaccgctgagcaatggaagcgggtaggcctttggggcagcggccaatagcagctttgctccttcgctttctgggctcagaggctgggaaggggtgggtccgggggcgggctcaggggcgggctcaggggcggggcgggcgcccgaaggtcctccggaggcccggcattctgcacgcttcaaaagcgcacgtctgccgcgctgttctcctcttcctcatctccgggcctttcgaattctcacgcgtcaagtggagcaaggcaggtggacagtggatcatggcgttgcctgtcacggcactgctccttccccttgcacttcttcttcatgcagctcgccccgagcagaaattgatctccgaagaagaccttcaggtccaactgcagcaatcaggtggaggacttgtgaaaccaggagggagtctgaggcttagctgcgcagcgagtgggtttactttctctagttacgccatgcactgggtgcgccaagcccccgggaaaggactggagtgggtcgctgttatttcatatgacgggtcaaataaatactacgccgattcagtaaagggtcgatttactatatctagggacaacagtaagaacacactttatctgcagatggatagcctgcgggcggaggacactgcagtctactattgcgcgaaggaaggagacagctcacgctggagctacgacctctggggaagggggactctcgtaacggtgtcatccggcggtggcggcagcggtggtggtggatcagggggaggggggtctcagtcagcactcacccaacccgcatccgtgtctggtagtccgggccagagtattactatctcctgtactgggacatcctccgacgttgggggctataactacgtcagctggtatcaacagcaccctggtaaggcacccaaggtaatgatctatgatgtgacaaacagacccagcggtgtttctaaccgatttagcggttcaaaatcaggtaacaccgcaagccttaccatatctggtctccaggctgaagacgaagccgactattactgcagcagctataccatagcctctacactggttgtcttcggaggaggcactaagctgactgtgctaaccacgacgccagcgccgcgaccaccaacaccggcgcccaccatcgcgtcgcagcccctgtccctgcgcccagaggcgtgctttatgtacgtggcagccgcggcatttgtacttctgtttttcgtggggtgcggtgtgcttctcagcaagaggaaacggaagcaccccaagaaaaagaggaaggtgtctagacccggagagcgcccattccagtgtcggatttgcatgcggaacttttcgagaagacacggcctggacagacatacccgtactcatacaggtgaaaaaccctttcagtgtcggatctgtatgcgaaatttctccgaccacagcagcctgaagagacatctacgtacccacaccggcagccagaagccatttcagtgtcggatctgtatgcggaacttctccgtgagacacaacctgaccagacatctacgtacgcacaccggagagaagccattccaatgccgaatatgcatgcgcaacttcagtgaccacagcaacctgagcagacacctaaaaacccacaccggttcccagaagccatttcagtgtcggatctgtatgcggaacttctcccagcgcagcagcctggtgagacatctacgtacgcacaccggagagaagccattccaatgccgaatatgcatgcgcaacttcagtgagagcggccacctgaagagacacctgcgtacgcacctgagggatgagtttcccaccatggtgtttccttctgggcagatcagccaggcctcggccttggccccggcccctccccaagtcctgccccaggctccagcccctgcccctgctccagccatggtatcagctctggcccaggccccagcccctgtcccagtcctagccccaggccctcctcaggctgtggccccacctgcccccaagcccacccaggctggggaaggaacgctgtcagaggccctgctgcagctgcagtttgatgatgaagacctgggggccttgcttggcaacagcacagacccagctgtgttcacagacctggcatccgtcgacaactccgagtttcagcagctgctgaaccagggcatacctgtggccccccacacaactgagcccatgctgatggagtaccctgaggctataactcgcctagtgacaggggcccagaggccccccgacccagctcctgctccactgggggccccggggctccccaatggcctcctttcaggagatgaagacttctcctccattgcggacatggacttctcagccctgctgagtcagatcagctccagtgggcagggaggaggtggaagcggcttcagcgtggacaccagtgccctgctggacctgttcagcccctcggtgaccgtgcccgacatgagcctgcctgaccttgacagcagcctggccagtatccaagagctcctgtctccccaggagccccccaggcctcccgaggcagagaacagcagcccggattcagggaagcagctggtgcactacacagcgcagccgctgttcctgctggaccccggctccgtggacaccgggagcaacgacctgccggtgctgtttgagctgggagagggctcctacttctccgaaggggacggcttcgccgaggaccccaccatctccctgctgacaggctcggagcctcccaaagccaaggaccccactgtctcctaagcggccgctaatcaacctctggattacaaaatttgtgaaagattgactggtattcttaactatgttgctccttttacgctatgtggatacgctgctttaatgcctttgtatcatgctattgcttcccgtatggctttcattttctcctccttgtataaatcctggttgctgtctctttatgaggagttgtggcccgttgtcaggcaacgtggcgtggtgtgcactgtgtttgctgacgcaacccccactggttggggcattgccaccacctgtcagctcctttccgggactttcgctttccccctccctattgccacggcggaactcatcgccgcctgccttgcccgctgctggacaggggctcggctgttgggcactgacaattccgtggtgttgtcggggaaatcatcgtcctttccttggctgctcgcctgtgttgccacctggattctgcgcgggacgtccttctgctacgtcccttcggccctcaatccagcggaccttccttcccgcggcctgctgccggctctgcggcctcttccgcgtcttcgccttcgccctcagacgagtcggatctccctttgggccgcctccccgcatcgataccgtcgaccgcgagggaattaattcgagctcggtacctttaagaccaatgacttacaaggcagctgtagatcttagccactttttaaaagaaaaggggggactggaagggctaattcactcccaacgaagacaagatctgctttttgcttgtactgggtctctctggttagaccagatctgagcctgggagctctctggctaactagggaacccactgcttaagcctcaataaagcttgccttgagtgcttcaagtagtgtgtgcccgtctgttgtgtgactctggtaactagagatccctcagacccttttagtcagtgtggaaaatctctagcagcatctagaattaattccgtgtattctatagtgtcacctaaatcgtatgtgtatgatacataaggttatgtattaattgtagccgcgttctaacgacaatatgtacaagcctaattgtgtagcatctggcttactgaagcagaccctatcatctctctcgtaaactgccgtcagagtcggtttggttggacgaaccttctgagtttctggtaacgccgtcccgcacccggaaatggtcagcgaaccaatcagcagggtcatcgctagccagatcctctacgccggacgcatcgtggccggcatcaccggcgccacaggtgcggttgctggcgcctatatcgccgacatcaccgatggggaagatcgggctcgccacttcgggctcatgagcgcttgtttcggcgtgggtatggtggcaggccccgtggccgggggactgttgggcgccatctccttgcatgcaccattccttgcggcggcggtgctcaacggcctcaacctactactgggctgcttcctaatgcaggagtcgcataagggagagcgtcgaatggtgcactctcagtacaatctagctctgatgccgcatagttaagccagccccgacacccgccaacacccgctgacgcgccctgacgggcttgtctgctcccggcatccgcttacagacaagctgtgaccgtctccgggagctgcatgtgtcagaggttttcaccgtcatcaccgaaacgcgcgagacgaaagggcctcgtgatacgcctatttttataggttaatgtcatgataataatggtttcttagacgtcaggtggcacttttcggggaaatgtgcgcggaacccctatttgtttatttttctaaatacattcaaatatgtatccgctcatgagacaataaccctgataaatgcttcaataatattgaaaaaggaagagtatgagtattcaacatttccgtgtcgcccttattcccttttttgcggcattttgccttcctgtttttgctcacccagaaacgctggtgaaagtaaaagatgctgaagatcagttgggtgcacgagtgggttacatcgaactggatctcaacagcggtaagatccttgagagttttcgccccgaagaacgttttccaatgatgagcacttttaaagttctgctatgtggcgcggtattatcccgtattgacgccgggcaagagcaactcggtcgccgcatacactattctcagaatgacttggttgagtactcaccagtcacagaaaagcatcttacggatggcatgacagtaagagaattatgcagtgctgccataaccatgagtgataacactgcggccaacttacttctgacaacgatcggaggaccgaaggagctaaccgcttttttgcacaacatgggggatcatgtaactcgccttgatcgttgggaaccggagctgaatgaagccataccaaacgacgagcgtgacaccacgatgcctgtagcaatggcaacaacgttgcgcaaactattaactggcgaactacttactctagcttcccggcaacaattaatagactggatggaggcggataaagttgcaggaccacttctgcgctcggcccttccggctggctggtttattgctgataaatctggagccggtgagcgtgggtctcgcggtatcattgcagcactggggccagatggtaagccctcccgtatcgtagttatctacacgacggggagtcaggcaactatggatgaacgaaatagacagatcgctgagataggtgcctcactgattaagcattggtaactgtcagaccaagtttactcatatatactttagattgatttaaaacttcatttttaatttaaaaggatctaggtgaagatcctttttgataatctcatgaccaaaatcccttaacgtgagttttcgttccactgagcgtcagaccccgtagaaaagatcaaaggatcttcttgagatcctttttttctgcgcgtaatctgctgcttgcaaacaaaaaaaccaccgctaccagcggtggtttgtttgccggatcaagagctaccaactctttttccgaaggtaactggcttcagcagagcgcagataccaaatactgtccttctagtgtagccgtagttaggccaccacttcaagaactctgtagcaccgcctacatacctcgctctgctaatcctgttaccagtggctgctgccagtggcgataagtcgtgtcttaccgggttggactcaagacgatagttaccggataaggcgcagcggtcgggctgaacggggggttcgtgcacacagcccagcttggagcgaacgacctacaccgaactgagatacctacagcgtgagctatgagaaagcgccacgcttcccgaagggagaaaggcggacaggtatccggtaagcggcagggtcggaacaggagagcgcacgagggagcttccagggggaaacgcctggtatctttatagtcctgtcgggtttcgccacctctgacttgagcgtcgatttttgtgatgctcgtcaggggggcggagcctatggaaaaacgccagcaacgcggcctttttacggttcctggccttttgctggccttttgctcacatgttctttcctgcgttatcccctgattctgtggataaccgtattaccgcctttgagtgagctgataccgctcgccgcagccgaacgaccgagcgcagcgagtcagtgagcgaggaagcggaagagcgcccaatacgcaaaccgcctctccccgcgcgttggccgattcattaatgcagctgtggaatgtgtgtcagttagggtgtggaaagtccccaggctccccagcaggcagaagtatgcaaagcatgcatctcaattagtcagcaaccaggtgtggaaagtccccaggctccccagcaggcagaagtatgcaaagcatgcatctcaattagtcagcaaccatagtcccgcccctaactccgcccatcccgcccctaactccgcccagttccgcccattctccgccccatggctgactaattttttttatttatgcagaggccgaggccgcctcggcctctgagctattccagaagtagtgaggaggcttttttggaggcctaggcttttgcaaaaagcttggacacaagacaggcttgcgagatatgtttgagaataccactttatcccgcgtcagggagaggcagtgcgtaaaaagacgcggactcatgtgaaatactggtttttagtgcgccagatctctataatctcgcgcaacctattttcccctcgaacactttttaagccgtagataaacaggctgggacacttcacatgagcgaaaaatacatcgtcacctgggacatgttgcagatccatgcacgtaaactcgcaagccgactgatgccttctgaacaatggaaaggcattattgccgtaagccgtggcggtctgtaccgggtgcgttactggcgcgtgaactgggtattcgtcatgtcgataccgtttgtatttccagctacgatcacgacaaccagcgcgagcttaaagtgctgaaacgcgcagaaggcgatggcgaaggcttcatcgttattgatgacctggtggataccggtggtactgcggttgcgattcgtgaaatgtatccaaaagcgcactttgtcaccatcttcgcaaaaccggctggtcgtccgctggttgatgactatgttgttgatatcccgcaagatacctggattgaacagccgtgggatatgggcgtcgtattcgtcccgccaatctccggtcgctaatcttttcaacgcctggcactgccgggcgttgttctttttaacttcaggcgggttacaatagtttccagtaagtattctggaggctgcatccatgacacaggcaaacctgagcgaaaccctgttcaaaccccgctttaaacatcctgaaacctcgacgctagtccgccgctttaatcacggcgcacaaccgcctgtgcagtcggcccttgatggtaaaaccatccctcactggtatcgcatgattaaccgtctgatgtggatctggcgcggcattgacccacgcgaaatcctcgacgtccaggcacgtattgtgatgagcgatgccgaacgtaccgacgatgatttatacgatacggtgattggctaccgtggcggcaactggatttatgagtgggccccggatctttgtgaaggaaccttacttctgtggtgtgacataattggacaaactacctacagagatttaaagctctaaggtaaatataaaatttttaagtgtataatgtgttaaactactgattctaattgtttgtgtattttagattccaacctatggaactgatgaatgggagcagtggtggaatgcctttaatgaggaaaacctgttttgctcagaagaaatgccatctagtgatgatgaggctactgctgactctcaacattctactcctccaaaaaagaagagaaaggtagaagaccccaaggactttccttcagaattgctaagttttttgagtcatgctgtgtttagtaatagaactcttgcttgctttgctatttacaccacaaaggaaaaagctgcactgctatacaagaaaattatggaaaaatattctgtaacctttataagtaggcataacagttataatcataacatactgttttttcttactccacacaggcatagagtgtctgctattaataactatgctcaaaaattgtgtacctttagctttttaatttgtaaaggggttaataaggaatatttgatgtatagtgccttgactagagatcataatcagccataccacatttgtagaggttttacttgctttaaaaaacctcccacacctccccctgaacctgaaacataaaatgaatgcaattgttgttgttaacttgtttattgcagcttataatggttacaaataaagcaatagcatcacaaatttcacaaataaagcatttttttcactgcattctagttgtggtttgtccaaactcatcaatgtatcttatcatgtctggatcaactggataactcaagctaaccaaaatcatcccaaacttcccaccccataccctattaccactgccaattacctagtggtttcatttactctaaacctgtgattcctctgaattattttcattttaaagaaattgtatttgttaaatatgtactacaaacttagtagt

SEQ ID NO: 186 - DNA, 11224 bp, Artificial sequence
  Synthetic construct
tggaagggctaattcactcccaaagaagacaagatatccttgatctgtggatctaccacacacaaggctacttccctgattagcagaactacacaccagggccaggggtcagatatccactgacctttggatggtgctacaagctagtaccagttgagccagataaggtagaagaggccaataaaggagagaacaccagcttgttacaccctgtgagcctgcatgggatggatgacccggagagagaagtgttagagtggaggtttgacagccgcctagcatttcatcacgtggcccgagagctgcatccggagtacttcaagaactgctgatatcgagcttgctacaagggactttccgctggggactttccagggaggcgtggcctgggcgggactggggagtggcgagccctcagatcctgcatataagcagctgctttttgcctgtactgggtctctctggttagaccagatctgagcctgggagctctctggctaactagggaacccactgcttaagcctcaataaagcttgccttgagtgcttcaagtagtgtgtgcccgtctgttgtgtgactctggtaactagagatccctcagacccttttagtcagtgtggaaaatctctagcagtggcgcccgaacagggacttgaaagcgaaagggaaaccagaggagctctctcgacgcaggactcggcttgctgaagcgcgcacggcaagaggcgaggggcggcgactggtgagtacgccaaaaattttgactagcggaggctagaaggagagagatgggtgcgagagcgtcagtattaagcgggggagaattagatcgcgatgggaaaaaattcggttaaggccagggggaaagaaaaaatataaattaaaacatatagtatgggcaagcagggagctagaacgattcgcagttaatcctggcctgttagaaacatcagaaggctgtagacaaatactgggacagctacaaccatcccttcagacaggatcagaagaacttagatcattatataatacagtagcaaccctctattgtgtgcatcaaaggatagagataaaagacaccaaggaagctttagacaagatagaggaagagcaaaacaaaagtaagaccaccgcacagcaagcggccggtgatcttcagacctggacgatatatatgagggacaattggagaagtgaattatataaatataaagtagtaaaaattgaaccattaggagtagcacccaccaaggcaaagagaagagtggtgcagagagaaaaaagagcagtgggaataggagctttgttccttgggttcttgggagcagcaggaagcactatgggcgcagcgtcaatgacgctgacggtacaggccagacaattattgtctggtatagtgcagcagcagaacaatttgctgagggctattgaggcgcaacagcatctgttgcaactcacagtctggggcatcaagcagctccaggcaagaatcctggctgtggaaagatacctaaaggatcaacagctcctggggatttggggttgctctggaaaactcatttgcaccactgctgtgccttggaatgctagttggagtaataaatctctggaacagatttggaatcacacgacctggatggagtgggacagagaaattaacaattacacaagcttaatacactccttaattgaagaatcgcaaaaccagcaagaaaagaatgaacaagaattattggaattagataaatgggcaagtttgtggaattggtttaacataacaaattggctgtggtatataaaattattcataatgatagtaggaggcttggtaggtttaagaatagtttttgctgtactttctatagtgaatagagttaggcagggatattcaccattatcgtttcagacccacctcccaaccccgaggggacccgacaggcccgaaggaatagaagaagaaggtggagagagagacagagacagatccattcgattagtgaacggatctcgacggtcgccaaatggcagtattcatccacaattttaaaagaaaaggggggattggggggtacagtgcaggggaaagaatagtagacataatagcaacagacatacaaactaaagaattacaaaaacaaattacaaaaattcaaaattttcgggtttattacagggacagcagagatccagtttggatcgataagcttgatatcgaattgggtaggggaggcgcttttcccaaggcagtctggagcatgcgctttagcagccccgctgggcacttggcgctacacaagtggcctctggcctcgcacacattccacatccaccggtaggcgccaaccggctccgttctttggtggccccttcgcgccaccttctactcctcccctagtcaggaagttcccccccgccccgcagctcgcgtcgtgcaggacgtgacaaatggaagtagcacgtctcactagtctcgtgcagatggacagcaccgctgagcaatggaagcgggtaggcctttggggcagcggccaatagcagctttgctccttcgctttctgggctcagaggctgggaaggggtgggtccgggggcgggctcaggggcgggctcaggggcggggcgggcgcccgaaggtcctccggaggcccggcattctgcacgcttcaaaagcgcacgtctgccgcgctgttctcctcttcctcatctccgggcctttcgaattctcacgcgtcaagtggagcaaggcaggtggacagtggatcatggcgttgcctgtcacggcactgctccttccccttgcacttcttcttcatgcagctcgccccgagcagaaattgatctccgaagaagaccttcaggtccaactgcagcaatcaggtggaggacttgtgaaaccaggagggagtctgaggcttagctgcgcagcgagtgggtttactttctctagttacgccatgcactgggtgcgccaagcccccgggaaaggactggagtgggtcgctgttatttcatatgacgggtcaaataaatactacgccgattcagtaaagggtcgatttactatatctagggacaacagtaagaacacactttatctgcagatggatagcctgcgggcggaggacactgcagtctactattgcgcgaaggaaggagacagctcacgctggagctacgacctctggggaagggggactctcgtaacggtgtcatccggcggtggcggcagcggtggtggtggatcagggggaggggggtctcagtcagcactcacccaacccgcatccgtgtctggtagtccgggccagagtattactatctcctgtactgggacatcctccgacgttgggggctataactacgtcagctggtatcaacagcaccctggtaaggcacccaaggtaatgatctatgatgtgacaaacagacccagcggtgtttctaaccgatttagcggttcaaaatcaggtaacaccgcaagccttaccatatctggtctccaggctgaagacgaagccgactattactgcagcagctataccatagcctctacactggttgtcttcggaggaggcactaagctgactgtgctaaccacgacgccagcgccgcgaccaccaacaccggcgcccaccatcgcgtcgcagcccctgtccctgcgcccagaggcgtgctttatgtacgtggcagccgcggcatttgtacttctgtttttcgtggggtgcggtgtgcttctcagcaagaggaaacggaagcaccccaagaaaaagaggaaggtgtctagacccggagagcgcccattccagtgtcggatttgcatgcggaacttttcgagaagacacggcctggacagacatacccgtactcatacaggtgaaaaaccctttcagtgtcggatctgtatgcgaaatttctccgaccacagcagcctgaagagacatctacgtacccacaccggcagccagaagccatttcagtgtcggatctgtatgcggaacttctccgtgagacacaacctgaccagacatctacgtacgcacaccggagagaagccattccaatgccgaatatgcatgcgcaacttcagtgaccacagcaacctgagcagacacctaaaaacccacaccggttcccagaagccatttcagtgtcggatctgtatgcggaacttctcccagcgcagcagcctggtgagacatctacgtacgcacaccggagagaagccattccaatgccgaatatgcatgcgcaacttcagtgagagcggccacctgaagagacacctgcgtacgcacctgagggatgagtttcccaccatggtgtttccttctgggcagatcagccaggcctcggccttggccccggcccctccccaagtcctgccccaggctccagcccctgcccctgctccagccatggtatcagctctggcccaggccccagcccctgtcccagtcctagccccaggccctcctcaggctgtggccccacctgcccccaagcccacccaggctggggaaggaacgctgtcagaggccctgctgcagctgcagtttgatgatgaagacctgggggccttgcttggcaacagcacagacccagctgtgttcacagacctggcatccgtcgacaactccgagtttcagcagctgctgaaccagggcatacctgtggccccccacacaactgagcccatgctgatggagtaccctgaggctataactcgcctagtgacaggggcccagaggccccccgacccagctcctgctccactgggggccccggggctccccaatggcctcctttcaggagatgaagacttctcctccattgcggacatggacttctcagccctgctgagtcagatcagctccagtgggcagggaggaggtggaagcgaccaaagcacctttgacattttgcaggatttggagttttcttctgggtccccaggtaaagagacgaatgagagtccttggagatcagacctgttgatagatgaaaactgtttgctttctcctctggcgggagaagacgattcattccttttggaaggaaactcgaatgaggactaagcggccgctaatcaacctctggattacaaaatttgtgaaagattgactggtattcttaactatgttgctccttttacgctatgtggatacgctgctttaatgcctttgtatcatgctattgcttcccgtatggctttcattttctcctccttgtataaatcctggttgctgtctctttatgaggagttgtggcccgttgtcaggcaacgtggcgtggtgtgcactgtgtttgctgacgcaacccccactggttggggcattgccaccacctgtcagctcctttccgggactttcgctttccccctccctattgccacggcggaactcatcgccgcctgccttgcccgctgctggacaggggctcggctgttgggcactgacaattccgtggtgttgtcggggaaatcatcgtcctttccttggctgctcgcctgtgttgccacctggattctgcgcgggacgtccttctgctacgtcccttcggccctcaatccagcggaccttccttcccgcggcctgctgccggctctgcggcctcttccgcgtcttcgccttcgccctcagacgagtcggatctccctttgggccgcctccccgcatcgataccgtcgaccgcgagggaattaattcgagctcggtacctttaagaccaatgacttacaaggcagctgtagatcttagccactttttaaaagaaaaggggggactggaagggctaattcactcccaacgaagacaagatctgctttttgcttgtactgggtctctctggttagaccagatctgagcctgggagctctctggctaactagggaacccactgcttaagcctcaataaagcttgccttgagtgcttcaagtagtgtgtgcccgtctgttgtgtgactctggtaactagagatccctcagacccttttagtcagtgtggaaaatctctagcagcatctagaattaattccgtgtattctatagtgtcacctaaatcgtatgtgtatgatacataaggttatgtattaattgtagccgcgttctaacgacaatatgtacaagcctaattgtgtagcatctggcttactgaagcagaccctatcatctctctcgtaaactgccgtcagagtcggtttggttggacgaaccttctgagtttctggtaacgccgtcccgcacccggaaatggtcagcgaaccaatcagcagggtcatcgctagccagatcctctacgccggacgcatcgtggccggcatcaccggcgccacaggtgcggttgctggcgcctatatcgccgacatcaccgatggggaagatcgggctcgccacttcgggctcatgagcgcttgtttcggcgtgggtatggtggcaggccccgtggccgggggactgttgggcgccatctccttgcatgcaccattccttgcggcggcggtgctcaacggcctcaacctactactgggctgcttcctaatgcaggagtcgcataagggagagcgtcgaatggtgcactctcagtacaatctagctctgatgccgcatagttaagccagccccgacacccgccaacacccgctgacgcgccctgacgggcttgtctgctcccggcatccgcttacagacaagctgtgaccgtctccgggagctgcatgtgtcagaggttttcaccgtcatcaccgaaacgcgcgagacgaaagggcctcgtgatacgcctatttttataggttaatgtcatgataataatggtttcttagacgtcaggtggcacttttcggggaaatgtgcgcggaacccctatttgtttatttttctaaatacattcaaatatgtatccgctcatgagacaataaccctgataaatgcttcaataatattgaaaaaggaagagtatgagtattcaacatttccgtgtcgcccttattcccttttttgcggcattttgccttcctgtttttgctcacccagaaacgctggtgaaagtaaaagatgctgaagatcagttgggtgcacgagtgggttacatcgaactggatctcaacagcggtaagatccttgagagttttcgccccgaagaacgttttccaatgatgagcacttttaaagttctgctatgtggcgcggtattatcccgtattgacgccgggcaagagcaactcggtcgccgcatacactattctcagaatgacttggttgagtactcaccagtcacagaaaagcatcttacggatggcatgacagtaagagaattatgcagtgctgccataaccatgagtgataacactgcggccaacttacttctgacaacgatcggaggaccgaaggagctaaccgcttttttgcacaacatgggggatcatgtaactcgccttgatcgttgggaaccggagctgaatgaagccataccaaacgacgagcgtgacaccacgatgcctgtagcaatggcaacaacgttgcgcaaactattaactggcgaactacttactctagcttcccggcaacaattaatagactggatggaggcggataaagttgcaggaccacttctgcgctcggcccttccggctggctggtttattgctgataaatctggagccggtgagcgtgggtctcgcggtatcattgcagcactggggccagatggtaagccctcccgtatcgtagttatctacacgacggggagtcaggcaactatggatgaacgaaatagacagatcgctgagataggtgcctcactgattaagcattggtaactgtcagaccaagtttactcatatatactttagattgatttaaaacttcatttttaatttaaaaggatctaggtgaagatcctttttgataatctcatgaccaaaatcccttaacgtgagttttcgttccactgagcgtcagaccccgtagaaaagatcaaaggatcttcttgagatcctttttttctgcgcgtaatctgctgcttgcaaacaaaaaaaccaccgctaccagcggtggtttgtttgccggatcaagagctaccaactctttttccgaaggtaactggcttcagcagagcgcagataccaaatactgtccttctagtgtagccgtagttaggccaccacttcaagaactctgtagcaccgcctacatacctcgctctgctaatcctgttaccagtggctgctgccagtggcgataagtcgtgtcttaccgggttggactcaagacgatagttaccggataaggcgcagcggtcgggctgaacggggggttcgtgcacacagcccagcttggagcgaacgacctacaccgaactgagatacctacagcgtgagctatgagaaagcgccacgcttcccgaagggagaaaggcggacaggtatccggtaagcggcagggtcggaacaggagagcgcacgagggagcttccagggggaaacgcctggtatctttatagtcctgtcgggtttcgccacctctgacttgagcgtcgatttttgtgatgctcgtcaggggggcggagcctatggaaaaacgccagcaacgcggcctttttacggttcctggccttttgctggccttttgctcacatgttctttcctgcgttatcccctgattctgtggataaccgtattaccgcctttgagtgagctgataccgctcgccgcagccgaacgaccgagcgcagcgagtcagtgagcgaggaagcggaagagcgcccaatacgcaaaccgcctctccccgcgcgttggccgattcattaatgcagctgtggaatgtgtgtcagttagggtgtggaaagtccccaggctccccagcaggcagaagtatgcaaagcatgcatctcaattagtcagcaaccaggtgtggaaagtccccaggctccccagcaggcagaagtatgcaaagcatgcatctcaattagtcagcaaccatagtcccgcccctaactccgcccatcccgcccctaactccgcccagttccgcccattctccgccccatggctgactaattttttttatttatgcagaggccgaggccgcctcggcctctgagctattccagaagtagtgaggaggcttttttggaggcctaggcttttgcaaaaagcttggacacaagacaggcttgcgagatatgtttgagaataccactttatcccgcgtcagggagaggcagtgcgtaaaaagacgcggactcatgtgaaatactggtttttagtgcgccagatctctataatctcgcgcaacctattttcccctcgaacactttttaagccgtagataaacaggctgggacacttcacatgagcgaaaaatacatcgtcacctgggacatgttgcagatccatgcacgtaaactcgcaagccgactgatgccttctgaacaatggaaaggcattattgccgtaagccgtggcggtctgtaccgggtgcgttactggcgcgtgaactgggtattcgtcatgtcgataccgtttgtatttccagctacgatcacgacaaccagcgcgagcttaaagtgctgaaacgcgcagaaggcgatggcgaaggcttcatcgttattgatgacctggtggataccggtggtactgcggttgcgattcgtgaaatgtatccaaaagcgcactttgtcaccatcttcgcaaaaccggctggtcgtccgctggttgatgactatgttgttgatatcccgcaagatacctggattgaacagccgtgggatatgggcgtcgtattcgtcccgccaatctccggtcgctaatcttttcaacgcctggcactgccgggcgttgttctttttaacttcaggcgggttacaatagtttccagtaagtattctggaggctgcatccatgacacaggcaaacctgagcgaaaccctgttcaaaccccgctttaaacatcctgaaacctcgacgctagtccgccgctttaatcacggcgcacaaccgcctgtgcagtcggcccttgatggtaaaaccatccctcactggtatcgcatgattaaccgtctgatgtggatctggcgcggcattgacccacgcgaaatcctcgacgtccaggcacgtattgtgatgagcgatgccgaacgtaccgacgatgatttatacgatacggtgattggctaccgtggcggcaactggatttatgagtgggccccggatctttgtgaaggaaccttacttctgtggtgtgacataattggacaaactacctacagagatttaaagctctaaggtaaatataaaatttttaagtgtataatgtgttaaactactgattctaattgtttgtgtattttagattccaacctatggaactgatgaatgggagcagtggtggaatgcctttaatgaggaaaacctgttttgctcagaagaaatgccatctagtgatgatgaggctactgctgactctcaacattctactcctccaaaaaagaagagaaaggtagaagaccccaaggactttccttcagaattgctaagttttttgagtcatgctgtgtttagtaatagaactcttgcttgctttgctatttacaccacaaaggaaaaagctgcactgctatacaagaaaattatggaaaaatattctgtaacctttataagtaggcataacagttataatcataacatactgttttttcttactccacacaggcatagagtgtctgctattaataactatgctcaaaaattgtgtacctttagctttttaatttgtaaaggggttaataaggaatatttgatgtatagtgccttgactagagatcataatcagccataccacatttgtagaggttttacttgctttaaaaaacctcccacacctccccctgaacctgaaacataaaatgaatgcaattgttgttgttaacttgtttattgcagcttataatggttacaaataaagcaatagcatcacaaatttcacaaataaagcatttttttcactgcattctagttgtggtttgtccaaactcatcaatgtatcttatcatgtctggatcaactggataactcaagctaaccaaaatcatcccaaacttcccaccccataccctattaccactgccaattacctagtggtttcatttactctaaacctgtgattcctctgaattattttcattttaaagaaattgtatttgttaaatatgtactacaaacttagtagt

SEQ ID NO: 187 - DNA, 11017 bp, Artificial sequence
  Synthetic construct
tggaagggctaattcactcccaaagaagacaagatatccttgatctgtggatctaccacacacaaggctacttccctgattagcagaactacacaccagggccaggggtcagatatccactgacctttggatggtgctacaagctagtaccagttgagccagataaggtagaagaggccaataaaggagagaacaccagcttgttacaccctgtgagcctgcatgggatggatgacccggagagagaagtgttagagtggaggtttgacagccgcctagcatttcatcacgtggcccgagagctgcatccggagtacttcaagaactgctgatatcgagcttgctacaagggactttccgctggggactttccagggaggcgtggcctgggcgggactggggagtggcgagccctcagatcctgcatataagcagctgctttttgcctgtactgggtctctctggttagaccagatctgagcctgggagctctctggctaactagggaacccactgcttaagcctcaataaagcttgccttgagtgcttcaagtagtgtgtgcccgtctgttgtgtgactctggtaactagagatccctcagacccttttagtcagtgtggaaaatctctagcagtggcgcccgaacagggacttgaaagcgaaagggaaaccagaggagctctctcgacgcaggactcggcttgctgaagcgcgcacggcaagaggcgaggggcggcgactggtgagtacgccaaaaattttgactagcggaggctagaaggagagagatgggtgcgagagcgtcagtattaagcgggggagaattagatcgcgatgggaaaaaattcggttaaggccagggggaaagaaaaaatataaattaaaacatatagtatgggcaagcagggagctagaacgattcgcagttaatcctggcctgttagaaacatcagaaggctgtagacaaatactgggacagctacaaccatcccttcagacaggatcagaagaacttagatcattatataatacagtagcaaccctctattgtgtgcatcaaaggatagagataaaagacaccaaggaagctttagacaagatagaggaagagcaaaacaaaagtaagaccaccgcacagcaagcggccggtgatcttcagacctggacgatatatatgagggacaattggagaagtgaattatataaatataaagtagtaaaaattgaaccattaggagtagcacccaccaaggcaaagagaagagtggtgcagagagaaaaaagagcagtgggaataggagctttgttccttgggttcttgggagcagcaggaagcactatgggcgcagcgtcaatgacgctgacggtacaggccagacaattattgtctggtatagtgcagcagcagaacaatttgctgagggctattgaggcgcaacagcatctgttgcaactcacagtctggggcatcaagcagctccaggcaagaatcctggctgtggaaagatacctaaaggatcaacagctcctggggatttggggttgctctggaaaactcatttgcaccactgctgtgccttggaatgctagttggagtaataaatctctggaacagatttggaatcacacgacctggatggagtgggacagagaaattaacaattacacaagcttaatacactccttaattgaagaatcgcaaaaccagcaagaaaagaatgaacaagaattattggaattagataaatgggcaagtttgtggaattggtttaacataacaaattggctgtggtatataaaattattcataatgatagtaggaggcttggtaggtttaagaatagtttttgctgtactttctatagtgaatagagttaggcagggatattcaccattatcgtttcagacccacctcccaaccccgaggggacccgacaggcccgaaggaatagaagaagaaggtggagagagagacagagacagatccattcgattagtgaacggatctcgacggtcgccaaatggcagtattcatccacaattttaaaagaaaaggggggattggggggtacagtgcaggggaaagaatagtagacataatagcaacagacatacaaactaaagaattacaaaaacaaattacaaaaattcaaaattttcgggtttattacagggacagcagagatccagtttggatcgataagcttgatatcgaattgggtaggggaggcgcttttcccaaggcagtctggagcatgcgctttagcagccccgctgggcacttggcgctacacaagtggcctctggcctcgcacacattccacatccaccggtaggcgccaaccggctccgttctttggtggccccttcgcgccaccttctactcctcccctagtcaggaagttcccccccgccccgcagctcgcgtcgtgcaggacgtgacaaatggaagtagcacgtctcactagtctcgtgcagatggacagcaccgctgagcaatggaagcgggtaggcctttggggcagcggccaatagcagctttgctccttcgctttctgggctcagaggctgggaaggggtgggtccgggggcgggctcaggggcgggctcaggggcggggcgggcgcccgaaggtcctccggaggcccggcattctgcacgcttcaaaagcgcacgtctgccgcgctgttctcctcttcctcatctccgggcctttcgaattctcacgcgtcaagtggagcaaggcaggtggacagtggatcatggcgttgcctgtcacggcactgctccttccccttgcacttcttcttcatgcagctcgccccgagcagaaattgatctccgaagaagaccttcaggtccaactgcagcaatcaggtggaggacttgtgaaaccaggagggagtctgaggcttagctgcgcagcgagtgggtttactttctctagttacgccatgcactgggtgcgccaagcccccgggaaaggactggagtgggtcgctgttatttcatatgacgggtcaaataaatactacgccgattcagtaaagggtcgatttactatatctagggacaacagtaagaacacactttatctgcagatggatagcctgcgggcggaggacactgcagtctactattgcgcgaaggaaggagacagctcacgctggagctacgacctctggggaagggggactctcgtaacggtgtcatccggcggtggcggcagcggtggtggtggatcagggggaggggggtctcagtcagcactcacccaacccgcatccgtgtctggtagtccgggccagagtattactatctcctgtactgggacatcctccgacgttgggggctataactacgtcagctggtatcaacagcaccctggtaaggcacccaaggtaatgatctatgatgtgacaaacagacccagcggtgtttctaaccgatttagcggttcaaaatcaggtaacaccgcaagccttaccatatctggtctccaggctgaagacgaagccgactattactgcagcagctataccatagcctctacactggttgtcttcggaggaggcactaagctgactgtgctaaccacgacgccagcgccgcgaccaccaacaccggcgcccaccatcgcgtcgcagcccctgtccctgcgcccagaggcgtgctttatgtacgtggcagccgcggcatttgtacttctgtttttcgtggggtgcggtgtgcttctcagcaagaggaaacggaagcaccggaggaagaagtctagacccggagagcgcccattccagtgtcggatttgcatgcggaacttttcgagaagacacggcctggacagacatacccgtactcatacaggtgaaaaaccctttcagtgtcggatctgtatgcgaaatttctccgaccacagcagcctgaagagacatctacgtacccacaccggcagccagaagccatttcagtgtcggatctgtatgcggaacttctccgtgagacacaacctgaccagacatctacgtacgcacaccggagagaagccattccaatgccgaatatgcatgcgcaacttcagtgaccacagcaacctgagcagacacctaaaaacccacaccggttcccagaagccatttcagtgtcggatctgtatgcggaacttctcccagcgcagcagcctggtgagacatctacgtacgcacaccggagagaagccattccaatgccgaatatgcatgcgcaacttcagtgagagcggccacctgaagagacacctgcgtacgcacctgagggatgagtttcccaccatggtgtttccttctgggcagatcagccaggcctcggccttggccccggcccctccccaagtcctgccccaggctccagcccctgcccctgctccagccatggtatcagctctggcccaggccccagcccctgtcccagtcctagccccaggccctcctcaggctgtggccccacctgcccccaagcccacccaggctggggaaggaacgctgtcagaggccctgctgcagctgcagtttgatgatgaagacctgggggccttgcttggcaacagcacagacccagctgtgttcacagacctggcatccgtcgacaactccgagtttcagcagctgctgaaccagggcatacctgtggccccccacacaactgagcccatgctgatggagtaccctgaggctataactcgcctagtgacaggggcccagaggccccccgacccagctcctgctccactgggggccccggggctccccaatggcctcctttcaggagatgaagacttctcctccattgcggacatggacttctcagccctgctgagtcagatcagctcctaagcggccgctaatcaacctctggattacaaaatttgtgaaagattgactggtattcttaactatgttgctccttttacgctatgtggatacgctgctttaatgcctttgtatcatgctattgcttcccgtatggctttcattttctcctccttgtataaatcctggttgctgtctctttatgaggagttgtggcccgttgtcaggcaacgtggcgtggtgtgcactgtgtttgctgacgcaacccccactggttggggcattgccaccacctgtcagctcctttccgggactttcgctttccccctccctattgccacggcggaactcatcgccgcctgccttgcccgctgctggacaggggctcggctgttgggcactgacaattccgtggtgttgtcggggaaatcatcgtcctttccttggctgctcgcctgtgttgccacctggattctgcgcgggacgtccttctgctacgtcccttcggccctcaatccagcggaccttccttcccgcggcctgctgccggctctgcggcctcttccgcgtcttcgccttcgccctcagacgagtcggatctccctttgggccgcctccccgcatcgataccgtcgaccgcgagggaattaattcgagctcggtacctttaagaccaatgacttacaaggcagctgtagatcttagccactttttaaaagaaaaggggggactggaagggctaattcactcccaacgaagacaagatctgctttttgcttgtactgggtctctctggttagaccagatctgagcctgggagctctctggctaactagggaacccactgcttaagcctcaataaagcttgccttgagtgcttcaagtagtgtgtgcccgtctgttgtgtgactctggtaactagagatccctcagacccttttagtcagtgtggaaaatctctagcagcatctagaattaattccgtgtattctatagtgtcacctaaatcgtatgtgtatgatacataaggttatgtattaattgtagccgcgttctaacgacaatatgtacaagcctaattgtgtagcatctggcttactgaagcagaccctatcatctctctcgtaaactgccgtcagagtcggtttggttggacgaaccttctgagtttctggtaacgccgtcccgcacccggaaatggtcagcgaaccaatcagcagggtcatcgctagccagatcctctacgccggacgcatcgtggccggcatcaccggcgccacaggtgcggttgctggcgcctatatcgccgacatcaccgatggggaagatcgggctcgccacttcgggctcatgagcgcttgtttcggcgtgggtatggtggcaggccccgtggccgggggactgttgggcgccatctccttgcatgcaccattccttgcggcggcggtgctcaacggcctcaacctactactgggctgcttcctaatgcaggagtcgcataagggagagcgtcgaatggtgcactctcagtacaatctagctctgatgccgcatagttaagccagccccgacacccgccaacacccgctgacgcgccctgacgggcttgtctgctcccggcatccgcttacagacaagctgtgaccgtctccgggagctgcatgtgtcagaggttttcaccgtcatcaccgaaacgcgcgagacgaaagggcctcgtgatacgcctatttttataggttaatgtcatgataataatggtttcttagacgtcaggtggcacttttcggggaaatgtgcgcggaacccctatttgtttatttttctaaatacattcaaatatgtatccgctcatgagacaataaccctgataaatgcttcaataatattgaaaaaggaagagtatgagtattcaacatttccgtgtcgcccttattcccttttttgcggcattttgccttcctgtttttgctcacccagaaacgctggtgaaagtaaaagatgctgaagatcagttgggtgcacgagtgggttacatcgaactggatctcaacagcggtaagatccttgagagttttcgccccgaagaacgttttccaatgatgagcacttttaaagttctgctatgtggcgcggtattatcccgtattgacgccgggcaagagcaactcggtcgccgcatacactattctcagaatgacttggttgagtactcaccagtcacagaaaagcatcttacggatggcatgacagtaagagaattatgcagtgctgccataaccatgagtgataacactgcggccaacttacttctgacaacgatcggaggaccgaaggagctaaccgcttttttgcacaacatgggggatcatgtaactcgccttgatcgttgggaaccggagctgaatgaagccataccaaacgacgagcgtgacaccacgatgcctgtagcaatggcaacaacgttgcgcaaactattaactggcgaactacttactctagcttcccggcaacaattaatagactggatggaggcggataaagttgcaggaccacttctgcgctcggcccttccggctggctggtttattgctgataaatctggagccggtgagcgtgggtctcgcggtatcattgcagcactggggccagatggtaagccctcccgtatcgtagttatctacacgacggggagtcaggcaactatggatgaacgaaatagacagatcgctgagataggtgcctcactgattaagcattggtaactgtcagaccaagtttactcatatatactttagattgatttaaaacttcatttttaatttaaaaggatctaggtgaagatcctttttgataatctcatgaccaaaatcccttaacgtgagttttcgttccactgagcgtcagaccccgtagaaaagatcaaaggatcttcttgagatcctttttttctgcgcgtaatctgctgcttgcaaacaaaaaaaccaccgctaccagcggtggtttgtttgccggatcaagagctaccaactctttttccgaaggtaactggcttcagcagagcgcagataccaaatactgtccttctagtgtagccgtagttaggccaccacttcaagaactctgtagcaccgcctacatacctcgctctgctaatcctgttaccagtggctgctgccagtggcgataagtcgtgtcttaccgggttggactcaagacgatagttaccggataaggcgcagcggtcgggctgaacggggggttcgtgcacacagcccagcttggagcgaacgacctacaccgaactgagatacctacagcgtgagctatgagaaagcgccacgcttcccgaagggagaaaggcggacaggtatccggtaagcggcagggtcggaacaggagagcgcacgagggagcttccagggggaaacgcctggtatctttatagtcctgtcgggtttcgccacctctgacttgagcgtcgatttttgtgatgctcgtcaggggggcggagcctatggaaaaacgccagcaacgcggcctttttacggttcctggccttttgctggccttttgctcacatgttctttcctgcgttatcccctgattctgtggataaccgtattaccgcctttgagtgagctgataccgctcgccgcagccgaacgaccgagcgcagcgagtcagtgagcgaggaagcggaagagcgcccaatacgcaaaccgcctctccccgcgcgttggccgattcattaatgcagctgtggaatgtgtgtcagttagggtgtggaaagtccccaggctccccagcaggcagaagtatgcaaagcatgcatctcaattagtcagcaaccaggtgtggaaagtccccaggctccccagcaggcagaagtatgcaaagcatgcatctcaattagtcagcaaccatagtcccgcccctaactccgcccatcccgcccctaactccgcccagttccgcccattctccgccccatggctgactaattttttttatttatgcagaggccgaggccgcctcggcctctgagctattccagaagtagtgaggaggcttttttggaggcctaggcttttgcaaaaagcttggacacaagacaggcttgcgagatatgtttgagaataccactttatcccgcgtcagggagaggcagtgcgtaaaaagacgcggactcatgtgaaatactggtttttagtgcgccagatctctataatctcgcgcaacctattttcccctcgaacactttttaagccgtagataaacaggctgggacacttcacatgagcgaaaaatacatcgtcacctgggacatgttgcagatccatgcacgtaaactcgcaagccgactgatgccttctgaacaatggaaaggcattattgccgtaagccgtggcggtctgtaccgggtgcgttactggcgcgtgaactgggtattcgtcatgtcgataccgtttgtatttccagctacgatcacgacaaccagcgcgagcttaaagtgctgaaacgcgcagaaggcgatggcgaaggcttcatcgttattgatgacctggtggataccggtggtactgcggttgcgattcgtgaaatgtatccaaaagcgcactttgtcaccatcttcgcaaaaccggctggtcgtccgctggttgatgactatgttgttgatatcccgcaagatacctggattgaacagccgtgggatatgggcgtcgtattcgtcccgccaatctccggtcgctaatcttttcaacgcctggcactgccgggcgttgttctttttaacttcaggcgggttacaatagtttccagtaagtattctggaggctgcatccatgacacaggcaaacctgagcgaaaccctgttcaaaccccgctttaaacatcctgaaacctcgacgctagtccgccgctttaatcacggcgcacaaccgcctgtgcagtcggcccttgatggtaaaaccatccctcactggtatcgcatgattaaccgtctgatgtggatctggcgcggcattgacccacgcgaaatcctcgacgtccaggcacgtattgtgatgagcgatgccgaacgtaccgacgatgatttatacgatacggtgattggctaccgtggcggcaactggatttatgagtgggccccggatctttgtgaaggaaccttacttctgtggtgtgacataattggacaaactacctacagagatttaaagctctaaggtaaatataaaatttttaagtgtataatgtgttaaactactgattctaattgtttgtgtattttagattccaacctatggaactgatgaatgggagcagtggtggaatgcctttaatgaggaaaacctgttttgctcagaagaaatgccatctagtgatgatgaggctactgctgactctcaacattctactcctccaaaaaagaagagaaaggtagaagaccccaaggactttccttcagaattgctaagttttttgagtcatgctgtgtttagtaatagaactcttgcttgctttgctatttacaccacaaaggaaaaagctgcactgctatacaagaaaattatggaaaaatattctgtaacctttataagtaggcataacagttataatcataacatactgttttttcttactccacacaggcatagagtgtctgctattaataactatgctcaaaaattgtgtacctttagctttttaatttgtaaaggggttaataaggaatatttgatgtatagtgccttgactagagatcataatcagccataccacatttgtagaggttttacttgctttaaaaaacctcccacacctccccctgaacctgaaacataaaatgaatgcaattgttgttgttaacttgtttattgcagcttataatggttacaaataaagcaatagcatcacaaatttcacaaataaagcatttttttcactgcattctagttgtggtttgtccaaactcatcaatgtatcttatcatgtctggatcaactggataactcaagctaaccaaaatcatcccaaacttcccaccccataccctattaccactgccaattacctagtggtttcatttactctaaacctgtgattcctctgaattattttcattttaaagaaattgtatttgttaaatatgtactacaaacttagtagt

SEQ ID NO: 188 - DNA, 11413 bp, Artificial sequence
  Synthetic construct
tggaagggctaattcactcccaaagaagacaagatatccttgatctgtggatctaccacacacaaggctacttccctgattagcagaactacacaccagggccaggggtcagatatccactgacctttggatggtgctacaagctagtaccagttgagccagataaggtagaagaggccaataaaggagagaacaccagcttgttacaccctgtgagcctgcatgggatggatgacccggagagagaagtgttagagtggaggtttgacagccgcctagcatttcatcacgtggcccgagagctgcatccggagtacttcaagaactgctgatatcgagcttgctacaagggactttccgctggggactttccagggaggcgtggcctgggcgggactggggagtggcgagccctcagatcctgcatataagcagctgctttttgcctgtactgggtctctctggttagaccagatctgagcctgggagctctctggctaactagggaacccactgcttaagcctcaataaagcttgccttgagtgcttcaagtagtgtgtgcccgtctgttgtgtgactctggtaactagagatccctcagacccttttagtcagtgtggaaaatctctagcagtggcgcccgaacagggacttgaaagcgaaagggaaaccagaggagctctctcgacgcaggactcggcttgctgaagcgcgcacggcaagaggcgaggggcggcgactggtgagtacgccaaaaattttgactagcggaggctagaaggagagagatgggtgcgagagcgtcagtattaagcgggggagaattagatcgcgatgggaaaaaattcggttaaggccagggggaaagaaaaaatataaattaaaacatatagtatgggcaagcagggagctagaacgattcgcagttaatcctggcctgttagaaacatcagaaggctgtagacaaatactgggacagctacaaccatcccttcagacaggatcagaagaacttagatcattatataatacagtagcaaccctctattgtgtgcatcaaaggatagagataaaagacaccaaggaagctttagacaagatagaggaagagcaaaacaaaagtaagaccaccgcacagcaagcggccggtgatcttcagacctggacgatatatatgagggacaattggagaagtgaattatataaatataaagtagtaaaaattgaaccattaggagtagcacccaccaaggcaaagagaagagtggtgcagagagaaaaaagagcagtgggaataggagctttgttccttgggttcttgggagcagcaggaagcactatgggcgcagcgtcaatgacgctgacggtacaggccagacaattattgtctggtatagtgcagcagcagaacaatttgctgagggctattgaggcgcaacagcatctgttgcaactcacagtctggggcatcaagcagctccaggcaagaatcctggctgtggaaagatacctaaaggatcaacagctcctggggatttggggttgctctggaaaactcatttgcaccactgctgtgccttggaatgctagttggagtaataaatctctggaacagatttggaatcacacgacctggatggagtgggacagagaaattaacaattacacaagcttaatacactccttaattgaagaatcgcaaaaccagcaagaaaagaatgaacaagaattattggaattagataaatgggcaagtttgtggaattggtttaacataacaaattggctgtggtatataaaattattcataatgatagtaggaggcttggtaggtttaagaatagtttttgctgtactttctatagtgaatagagttaggcagggatattcaccattatcgtttcagacccacctcccaaccccgaggggacccgacaggcccgaaggaatagaagaagaaggtggagagagagacagagacagatccattcgattagtgaacggatctcgacggtcgccaaatggcagtattcatccacaattttaaaagaaaaggggggattggggggtacagtgcaggggaaagaatagtagacataatagcaacagacatacaaactaaagaattacaaaaacaaattacaaaaattcaaaattttcgggtttattacagggacagcagagatccagtttggatcgataagcttgatatcgaattgggtaggggaggcgcttttcccaaggcagtctggagcatgcgctttagcagccccgctgggcacttggcgctacacaagtggcctctggcctcgcacacattccacatccaccggtaggcgccaaccggctccgttctttggtggccccttcgcgccaccttctactcctcccctagtcaggaagttcccccccgccccgcagctcgcgtcgtgcaggacgtgacaaatggaagtagcacgtctcactagtctcgtgcagatggacagcaccgctgagcaatggaagcgggtaggcctttggggcagcggccaatagcagctttgctccttcgctttctgggctcagaggctgggaaggggtgggtccgggggcgggctcaggggcgggctcaggggcggggcgggcgcccgaaggtcctccggaggcccggcattctgcacgcttcaaaagcgcacgtctgccgcgctgttctcctcttcctcatctccgggcctttcgaattctcacgcgtcaagtggagcaaggcaggtggacagtggatcatggcgttgcctgtcacggcactgctccttccccttgcacttcttcttcatgcagctcgccccgagcagaaattgatctccgaagaagaccttcaggtccaactgcagcaatcaggtggaggacttgtgaaaccaggagggagtctgaggcttagctgcgcagcgagtgggtttactttctctagttacgccatgcactgggtgcgccaagcccccgggaaaggactggagtgggtcgctgttatttcatatgacgggtcaaataaatactacgccgattcagtaaagggtcgatttactatatctagggacaacagtaagaacacactttatctgcagatggatagcctgcgggcggaggacactgcagtctactattgcgcgaaggaaggagacagctcacgctggagctacgacctctggggaagggggactctcgtaacggtgtcatccggcggtggcggcagcggtggtggtggatcagggggaggggggtctcagtcagcactcacccaacccgcatccgtgtctggtagtccgggccagagtattactatctcctgtactgggacatcctccgacgttgggggctataactacgtcagctggtatcaacagcaccctggtaaggcacccaaggtaatgatctatgatgtgacaaacagacccagcggtgtttctaaccgatttagcggttcaaaatcaggtaacaccgcaagccttaccatatctggtctccaggctgaagacgaagccgactattactgcagcagctataccatagcctctacactggttgtcttcggaggaggcactaagctgactgtgctaaccacgacgccagcgccgcgaccaccaacaccggcgcccaccatcgcgtcgcagcccctgtccctgcgcccagaggcgtgctttatgtacgtggcagccgcggcatttgtacttctgtttttcgtggggtgcggtgtgcttctcagcaagaggaaacggaagcaccggaggaagaagtctagacccggagagcgcccattccagtgtcggatttgcatgcggaacttttcgagaagacacggcctggacagacatacccgtactcatacaggtgaaaaaccctttcagtgtcggatctgtatgcgaaatttctccgaccacagcagcctgaagagacatctacgtacccacaccggcagccagaagccatttcagtgtcggatctgtatgcggaacttctccgtgagacacaacctgaccagacatctacgtacgcacaccggagagaagccattccaatgccgaatatgcatgcgcaacttcagtgaccacagcaacctgagcagacacctaaaaacccacaccggttcccagaagccatttcagtgtcggatctgtatgcggaacttctcccagcgcagcagcctggtgagacatctacgtacgcacaccggagagaagccattccaatgccgaatatgcatgcgcaacttcagtgagagcggccacctgaagagacacctgcgtacgcacctgagggatgagtttcccaccatggtgtttccttctgggcagatcagccaggcctcggccttggccccggcccctccccaagtcctgccccaggctccagcccctgcccctgctccagccatggtatcagctctggcccaggccccagcccctgtcccagtcctagccccaggccctcctcaggctgtggccccacctgcccccaagcccacccaggctggggaaggaacgctgtcagaggccctgctgcagctgcagtttgatgatgaagacctgggggccttgcttggcaacagcacagacccagctgtgttcacagacctggcatccgtcgacaactccgagtttcagcagctgctgaaccagggcatacctgtggccccccacacaactgagcccatgctgatggagtaccctgaggctataactcgcctagtgacaggggcccagaggccccccgacccagctcctgctccactgggggccccggggctccccaatggcctcctttcaggagatgaagacttctcctccattgcggacatggacttctcagccctgctgagtcagatcagctccagtgggcagggaggaggtggaagcggcttcagcgtggacaccagtgccctgctggacctgttcagcccctcggtgaccgtgcccgacatgagcctgcctgaccttgacagcagcctggccagtatccaagagctcctgtctccccaggagccccccaggcctcccgaggcagagaacagcagcccggattcagggaagcagctggtgcactacacagcgcagccgctgttcctgctggaccccggctccgtggacaccgggagcaacgacctgccggtgctgtttgagctgggagagggctcctacttctccgaaggggacggcttcgccgaggaccccaccatctccctgctgacaggctcggagcctcccaaagccaaggaccccactgtctcctaagcggccgctaatcaacctctggattacaaaatttgtgaaagattgactggtattcttaactatgttgctccttttacgctatgtggatacgctgctttaatgcctttgtatcatgctattgcttcccgtatggctttcattttctcctccttgtataaatcctggttgctgtctctttatgaggagttgtggcccgttgtcaggcaacgtggcgtggtgtgcactgtgtttgctgacgcaacccccactggttggggcattgccaccacctgtcagctcctttccgggactttcgctttccccctccctattgccacggcggaactcatcgccgcctgccttgcccgctgctggacaggggctcggctgttgggcactgacaattccgtggtgttgtcggggaaatcatcgtcctttccttggctgctcgcctgtgttgccacctggattctgcgcgggacgtccttctgctacgtcccttcggccctcaatccagcggaccttccttcccgcggcctgctgccggctctgcggcctcttccgcgtcttcgccttcgccctcagacgagtcggatctccctttgggccgcctccccgcatcgataccgtcgaccgcgagggaattaattcgagctcggtacctttaagaccaatgacttacaaggcagctgtagatcttagccactttttaaaagaaaaggggggactggaagggctaattcactcccaacgaagacaagatctgctttttgcttgtactgggtctctctggttagaccagatctgagcctgggagctctctggctaactagggaacccactgcttaagcctcaataaagcttgccttgagtgcttcaagtagtgtgtgcccgtctgttgtgtgactctggtaactagagatccctcagacccttttagtcagtgtggaaaatctctagcagcatctagaattaattccgtgtattctatagtgtcacctaaatcgtatgtgtatgatacataaggttatgtattaattgtagccgcgttctaacgacaatatgtacaagcctaattgtgtagcatctggcttactgaagcagaccctatcatctctctcgtaaactgccgtcagagtcggtttggttggacgaaccttctgagtttctggtaacgccgtcccgcacccggaaatggtcagcgaaccaatcagcagggtcatcgctagccagatcctctacgccggacgcatcgtggccggcatcaccggcgccacaggtgcggttgctggcgcctatatcgccgacatcaccgatggggaagatcgggctcgccacttcgggctcatgagcgcttgtttcggcgtgggtatggtggcaggccccgtggccgggggactgttgggcgccatctccttgcatgcaccattccttgcggcggcggtgctcaacggcctcaacctactactgggctgcttcctaatgcaggagtcgcataagggagagcgtcgaatggtgcactctcagtacaatctagctctgatgccgcatagttaagccagccccgacacccgccaacacccgctgacgcgccctgacgggcttgtctgctcccggcatccgcttacagacaagctgtgaccgtctccgggagctgcatgtgtcagaggttttcaccgtcatcaccgaaacgcgcgagacgaaagggcctcgtgatacgcctatttttataggttaatgtcatgataataatggtttcttagacgtcaggtggcacttttcggggaaatgtgcgcggaacccctatttgtttatttttctaaatacattcaaatatgtatccgctcatgagacaataaccctgataaatgcttcaataatattgaaaaaggaagagtatgagtattcaacatttccgtgtcgcccttattcccttttttgcggcattttgccttcctgtttttgctcacccagaaacgctggtgaaagtaaaagatgctgaagatcagttgggtgcacgagtgggttacatcgaactggatctcaacagcggtaagatccttgagagttttcgccccgaagaacgttttccaatgatgagcacttttaaagttctgctatgtggcgcggtattatcccgtattgacgccgggcaagagcaactcggtcgccgcatacactattctcagaatgacttggttgagtactcaccagtcacagaaaagcatcttacggatggcatgacagtaagagaattatgcagtgctgccataaccatgagtgataacactgcggccaacttacttctgacaacgatcggaggaccgaaggagctaaccgcttttttgcacaacatgggggatcatgtaactcgccttgatcgttgggaaccggagctgaatgaagccataccaaacgacgagcgtgacaccacgatgcctgtagcaatggcaacaacgttgcgcaaactattaactggcgaactacttactctagcttcccggcaacaattaatagactggatggaggcggataaagttgcaggaccacttctgcgctcggcccttccggctggctggtttattgctgataaatctggagccggtgagcgtgggtctcgcggtatcattgcagcactggggccagatggtaagccctcccgtatcgtagttatctacacgacggggagtcaggcaactatggatgaacgaaatagacagatcgctgagataggtgcctcactgattaagcattggtaactgtcagaccaagtttactcatatatactttagattgatttaaaacttcatttttaatttaaaaggatctaggtgaagatcctttttgataatctcatgaccaaaatcccttaacgtgagttttcgttccactgagcgtcagaccccgtagaaaagatcaaaggatcttcttgagatcctttttttctgcgcgtaatctgctgcttgcaaacaaaaaaaccaccgctaccagcggtggtttgtttgccggatcaagagctaccaactctttttccgaaggtaactggcttcagcagagcgcagataccaaatactgtccttctagtgtagccgtagttaggccaccacttcaagaactctgtagcaccgcctacatacctcgctctgctaatcctgttaccagtggctgctgccagtggcgataagtcgtgtcttaccgggttggactcaagacgatagttaccggataaggcgcagcggtcgggctgaacggggggttcgtgcacacagcccagcttggagcgaacgacctacaccgaactgagatacctacagcgtgagctatgagaaagcgccacgcttcccgaagggagaaaggcggacaggtatccggtaagcggcagggtcggaacaggagagcgcacgagggagcttccagggggaaacgcctggtatctttatagtcctgtcgggtttcgccacctctgacttgagcgtcgatttttgtgatgctcgtcaggggggcggagcctatggaaaaacgccagcaacgcggcctttttacggttcctggccttttgctggccttttgctcacatgttctttcctgcgttatcccctgattctgtggataaccgtattaccgcctttgagtgagctgataccgctcgccgcagccgaacgaccgagcgcagcgagtcagtgagcgaggaagcggaagagcgcccaatacgcaaaccgcctctccccgcgcgttggccgattcattaatgcagctgtggaatgtgtgtcagttagggtgtggaaagtccccaggctccccagcaggcagaagtatgcaaagcatgcatctcaattagtcagcaaccaggtgtggaaagtccccaggctccccagcaggcagaagtatgcaaagcatgcatctcaattagtcagcaaccatagtcccgcccctaactccgcccatcccgcccctaactccgcccagttccgcccattctccgccccatggctgactaattttttttatttatgcagaggccgaggccgcctcggcctctgagctattccagaagtagtgaggaggcttttttggaggcctaggcttttgcaaaaagcttggacacaagacaggcttgcgagatatgtttgagaataccactttatcccgcgtcagggagaggcagtgcgtaaaaagacgcggactcatgtgaaatactggtttttagtgcgccagatctctataatctcgcgcaacctattttcccctcgaacactttttaagccgtagataaacaggctgggacacttcacatgagcgaaaaatacatcgtcacctgggacatgttgcagatccatgcacgtaaactcgcaagccgactgatgccttctgaacaatggaaaggcattattgccgtaagccgtggcggtctgtaccgggtgcgttactggcgcgtgaactgggtattcgtcatgtcgataccgtttgtatttccagctacgatcacgacaaccagcgcgagcttaaagtgctgaaacgcgcagaaggcgatggcgaaggcttcatcgttattgatgacctggtggataccggtggtactgcggttgcgattcgtgaaatgtatccaaaagcgcactttgtcaccatcttcgcaaaaccggctggtcgtccgctggttgatgactatgttgttgatatcccgcaagatacctggattgaacagccgtgggatatgggcgtcgtattcgtcccgccaatctccggtcgctaatcttttcaacgcctggcactgccgggcgttgttctttttaacttcaggcgggttacaatagtttccagtaagtattctggaggctgcatccatgacacaggcaaacctgagcgaaaccctgttcaaaccccgctttaaacatcctgaaacctcgacgctagtccgccgctttaatcacggcgcacaaccgcctgtgcagtcggcccttgatggtaaaaccatccctcactggtatcgcatgattaaccgtctgatgtggatctggcgcggcattgacccacgcgaaatcctcgacgtccaggcacgtattgtgatgagcgatgccgaacgtaccgacgatgatttatacgatacggtgattggctaccgtggcggcaactggatttatgagtgggccccggatctttgtgaaggaaccttacttctgtggtgtgacataattggacaaactacctacagagatttaaagctctaaggtaaatataaaatttttaagtgtataatgtgttaaactactgattctaattgtttgtgtattttagattccaacctatggaactgatgaatgggagcagtggtggaatgcctttaatgaggaaaacctgttttgctcagaagaaatgccatctagtgatgatgaggctactgctgactctcaacattctactcctccaaaaaagaagagaaaggtagaagaccccaaggactttccttcagaattgctaagttttttgagtcatgctgtgtttagtaatagaactcttgcttgctttgctatttacaccacaaaggaaaaagctgcactgctatacaagaaaattatggaaaaatattctgtaacctttataagtaggcataacagttataatcataacatactgttttttcttactccacacaggcatagagtgtctgctattaataactatgctcaaaaattgtgtacctttagctttttaatttgtaaaggggttaataaggaatatttgatgtatagtgccttgactagagatcataatcagccataccacatttgtagaggttttacttgctttaaaaaacctcccacacctccccctgaacctgaaacataaaatgaatgcaattgttgttgttaacttgtttattgcagcttataatggttacaaataaagcaatagcatcacaaatttcacaaataaagcatttttttcactgcattctagttgtggtttgtccaaactcatcaatgtatcttatcatgtctggatcaactggataactcaagctaaccaaaatcatcccaaacttcccaccccataccctattaccactgccaattacctagtggtttcatttactctaaacctgtgattcctctgaattattttcattttaaagaaattgtatttgttaaatatgtactacaaacttagtagt

SEQ ID NO: 189 - DNA, 11215 bp, Artificial sequence
  Synthetic construct
tggaagggctaattcactcccaaagaagacaagatatccttgatctgtggatctaccacacacaaggctacttccctgattagcagaactacacaccagggccaggggtcagatatccactgacctttggatggtgctacaagctagtaccagttgagccagataaggtagaagaggccaataaaggagagaacaccagcttgttacaccctgtgagcctgcatgggatggatgacccggagagagaagtgttagagtggaggtttgacagccgcctagcatttcatcacgtggcccgagagctgcatccggagtacttcaagaactgctgatatcgagcttgctacaagggactttccgctggggactttccagggaggcgtggcctgggcgggactggggagtggcgagccctcagatcctgcatataagcagctgctttttgcctgtactgggtctctctggttagaccagatctgagcctgggagctctctggctaactagggaacccactgcttaagcctcaataaagcttgccttgagtgcttcaagtagtgtgtgcccgtctgttgtgtgactctggtaactagagatccctcagacccttttagtcagtgtggaaaatctctagcagtggcgcccgaacagggacttgaaagcgaaagggaaaccagaggagctctctcgacgcaggactcggcttgctgaagcgcgcacggcaagaggcgaggggcggcgactggtgagtacgccaaaaattttgactagcggaggctagaaggagagagatgggtgcgagagcgtcagtattaagcgggggagaattagatcgcgatgggaaaaaattcggttaaggccagggggaaagaaaaaatataaattaaaacatatagtatgggcaagcagggagctagaacgattcgcagttaatcctggcctgttagaaacatcagaaggctgtagacaaatactgggacagctacaaccatcccttcagacaggatcagaagaacttagatcattatataatacagtagcaaccctctattgtgtgcatcaaaggatagagataaaagacaccaaggaagctttagacaagatagaggaagagcaaaacaaaagtaagaccaccgcacagcaagcggccggtgatcttcagacctggacgatatatatgagggacaattggagaagtgaattatataaatataaagtagtaaaaattgaaccattaggagtagcacccaccaaggcaaagagaagagtggtgcagagagaaaaaagagcagtgggaataggagctttgttccttgggttcttgggagcagcaggaagcactatgggcgcagcgtcaatgacgctgacggtacaggccagacaattattgtctggtatagtgcagcagcagaacaatttgctgagggctattgaggcgcaacagcatctgttgcaactcacagtctggggcatcaagcagctccaggcaagaatcctggctgtggaaagatacctaaaggatcaacagctcctggggatttggggttgctctggaaaactcatttgcaccactgctgtgccttggaatgctagttggagtaataaatctctggaacagatttggaatcacacgacctggatggagtgggacagagaaattaacaattacacaagcttaatacactccttaattgaagaatcgcaaaaccagcaagaaaagaatgaacaagaattattggaattagataaatgggcaagtttgtggaattggtttaacataacaaattggctgtggtatataaaattattcataatgatagtaggaggcttggtaggtttaagaatagtttttgctgtactttctatagtgaatagagttaggcagggatattcaccattatcgtttcagacccacctcccaaccccgaggggacccgacaggcccgaaggaatagaagaagaaggtggagagagagacagagacagatccattcgattagtgaacggatctcgacggtcgccaaatggcagtattcatccacaattttaaaagaaaaggggggattggggggtacagtgcaggggaaagaatagtagacataatagcaacagacatacaaactaaagaattacaaaaacaaattacaaaaattcaaaattttcgggtttattacagggacagcagagatccagtttggatcgataagcttgatatcgaattgggtaggggaggcgcttttcccaaggcagtctggagcatgcgctttagcagccccgctgggcacttggcgctacacaagtggcctctggcctcgcacacattccacatccaccggtaggcgccaaccggctccgttctttggtggccccttcgcgccaccttctactcctcccctagtcaggaagttcccccccgccccgcagctcgcgtcgtgcaggacgtgacaaatggaagtagcacgtctcactagtctcgtgcagatggacagcaccgctgagcaatggaagcgggtaggcctttggggcagcggccaatagcagctttgctccttcgctttctgggctcagaggctgggaaggggtgggtccgggggcgggctcaggggcgggctcaggggcggggcgggcgcccgaaggtcctccggaggcccggcattctgcacgcttcaaaagcgcacgtctgccgcgctgttctcctcttcctcatctccgggcctttcgaattctcacgcgtcaagtggagcaaggcaggtggacagtggatcatggcgttgcctgtcacggcactgctccttccccttgcacttcttcttcatgcagctcgccccgagcagaaattgatctccgaagaagaccttcaggtccaactgcagcaatcaggtggaggacttgtgaaaccaggagggagtctgaggcttagctgcgcagcgagtgggtttactttctctagttacgccatgcactgggtgcgccaagcccccgggaaaggactggagtgggtcgctgttatttcatatgacgggtcaaataaatactacgccgattcagtaaagggtcgatttactatatctagggacaacagtaagaacacactttatctgcagatggatagcctgcgggcggaggacactgcagtctactattgcgcgaaggaaggagacagctcacgctggagctacgacctctggggaagggggactctcgtaacggtgtcatccggcggtggcggcagcggtggtggtggatcagggggaggggggtctcagtcagcactcacccaacccgcatccgtgtctggtagtccgggccagagtattactatctcctgtactgggacatcctccgacgttgggggctataactacgtcagctggtatcaacagcaccctggtaaggcacccaaggtaatgatctatgatgtgacaaacagacccagcggtgtttctaaccgatttagcggttcaaaatcaggtaacaccgcaagccttaccatatctggtctccaggctgaagacgaagccgactattactgcagcagctataccatagcctctacactggttgtcttcggaggaggcactaagctgactgtgctaaccacgacgccagcgccgcgaccaccaacaccggcgcccaccatcgcgtcgcagcccctgtccctgcgcccagaggcgtgctttatgtacgtggcagccgcggcatttgtacttctgtttttcgtggggtgcggtgtgcttctcagcaagaggaaacggaagcaccggaggaagaagtctagacccggagagcgcccattccagtgtcggatttgcatgcggaacttttcgagaagacacggcctggacagacatacccgtactcatacaggtgaaaaaccctttcagtgtcggatctgtatgcgaaatttctccgaccacagcagcctgaagagacatctacgtacccacaccggcagccagaagccatttcagtgtcggatctgtatgcggaacttctccgtgagacacaacctgaccagacatctacgtacgcacaccggagagaagccattccaatgccgaatatgcatgcgcaacttcagtgaccacagcaacctgagcagacacctaaaaacccacaccggttcccagaagccatttcagtgtcggatctgtatgcggaacttctcccagcgcagcagcctggtgagacatctacgtacgcacaccggagagaagccattccaatgccgaatatgcatgcgcaacttcagtgagagcggccacctgaagagacacctgcgtacgcacctgagggatgagtttcccaccatggtgtttccttctgggcagatcagccaggcctcggccttggccccggcccctccccaagtcctgccccaggctccagcccctgcccctgctccagccatggtatcagctctggcccaggccccagcccctgtcccagtcctagccccaggccctcctcaggctgtggccccacctgcccccaagcccacccaggctggggaaggaacgctgtcagaggccctgctgcagctgcagtttgatgatgaagacctgggggccttgcttggcaacagcacagacccagctgtgttcacagacctggcatccgtcgacaactccgagtttcagcagctgctgaaccagggcatacctgtggccccccacacaactgagcccatgctgatggagtaccctgaggctataactcgcctagtgacaggggcccagaggccccccgacccagctcctgctccactgggggccccggggctccccaatggcctcctttcaggagatgaagacttctcctccattgcggacatggacttctcagccctgctgagtcagatcagctccagtgggcagggaggaggtggaagcgaccaaagcacctttgacattttgcaggatttggagttttcttctgggtccccaggtaaagagacgaatgagagtccttggagatcagacctgttgatagatgaaaactgtttgctttctcctctggcgggagaagacgattcattccttttggaaggaaactcgaatgaggactaagcggccgctaatcaacctctggattacaaaatttgtgaaagattgactggtattcttaactatgttgctccttttacgctatgtggatacgctgctttaatgcctttgtatcatgctattgcttcccgtatggctttcattttctcctccttgtataaatcctggttgctgtctctttatgaggagttgtggcccgttgtcaggcaacgtggcgtggtgtgcactgtgtttgctgacgcaacccccactggttggggcattgccaccacctgtcagctcctttccgggactttcgctttccccctccctattgccacggcggaactcatcgccgcctgccttgcccgctgctggacaggggctcggctgttgggcactgacaattccgtggtgttgtcggggaaatcatcgtcctttccttggctgctcgcctgtgttgccacctggattctgcgcgggacgtccttctgctacgtcccttcggccctcaatccagcggaccttccttcccgcggcctgctgccggctctgcggcctcttccgcgtcttcgccttcgccctcagacgagtcggatctccctttgggccgcctccccgcatcgataccgtcgaccgcgagggaattaattcgagctcggtacctttaagaccaatgacttacaaggcagctgtagatcttagccactttttaaaagaaaaggggggactggaagggctaattcactcccaacgaagacaagatctgctttttgcttgtactgggtctctctggttagaccagatctgagcctgggagctctctggctaactagggaacccactgcttaagcctcaataaagcttgccttgagtgcttcaagtagtgtgtgcccgtctgttgtgtgactctggtaactagagatccctcagacccttttagtcagtgtggaaaatctctagcagcatctagaattaattccgtgtattctatagtgtcacctaaatcgtatgtgtatgatacataaggttatgtattaattgtagccgcgttctaacgacaatatgtacaagcctaattgtgtagcatctggcttactgaagcagaccctatcatctctctcgtaaactgccgtcagagtcggtttggttggacgaaccttctgagtttctggtaacgccgtcccgcacccggaaatggtcagcgaaccaatcagcagggtcatcgctagccagatcctctacgccggacgcatcgtggccggcatcaccggcgccacaggtgcggttgctggcgcctatatcgccgacatcaccgatggggaagatcgggctcgccacttcgggctcatgagcgcttgtttcggcgtgggtatggtggcaggccccgtggccgggggactgttgggcgccatctccttgcatgcaccattccttgcggcggcggtgctcaacggcctcaacctactactgggctgcttcctaatgcaggagtcgcataagggagagcgtcgaatggtgcactctcagtacaatctagctctgatgccgcatagttaagccagccccgacacccgccaacacccgctgacgcgccctgacgggcttgtctgctcccggcatccgcttacagacaagctgtgaccgtctccgggagctgcatgtgtcagaggttttcaccgtcatcaccgaaacgcgcgagacgaaagggcctcgtgatacgcctatttttataggttaatgtcatgataataatggtttcttagacgtcaggtggcacttttcggggaaatgtgcgcggaacccctatttgtttatttttctaaatacattcaaatatgtatccgctcatgagacaataaccctgataaatgcttcaataatattgaaaaaggaagagtatgagtattcaacatttccgtgtcgcccttattcccttttttgcggcattttgccttcctgtttttgctcacccagaaacgctggtgaaagtaaaagatgctgaagatcagttgggtgcacgagtgggttacatcgaactggatctcaacagcggtaagatccttgagagttttcgccccgaagaacgttttccaatgatgagcacttttaaagttctgctatgtggcgcggtattatcccgtattgacgccgggcaagagcaactcggtcgccgcatacactattctcagaatgacttggttgagtactcaccagtcacagaaaagcatcttacggatggcatgacagtaagagaattatgcagtgctgccataaccatgagtgataacactgcggccaacttacttctgacaacgatcggaggaccgaaggagctaaccgcttttttgcacaacatgggggatcatgtaactcgccttgatcgttgggaaccggagctgaatgaagccataccaaacgacgagcgtgacaccacgatgcctgtagcaatggcaacaacgttgcgcaaactattaactggcgaactacttactctagcttcccggcaacaattaatagactggatggaggcggataaagttgcaggaccacttctgcgctcggcccttccggctggctggtttattgctgataaatctggagccggtgagcgtgggtctcgcggtatcattgcagcactggggccagatggtaagccctcccgtatcgtagttatctacacgacggggagtcaggcaactatggatgaacgaaatagacagatcgctgagataggtgcctcactgattaagcattggtaactgtcagaccaagtttactcatatatactttagattgatttaaaacttcatttttaatttaaaaggatctaggtgaagatcctttttgataatctcatgaccaaaatcccttaacgtgagttttcgttccactgagcgtcagaccccgtagaaaagatcaaaggatcttcttgagatcctttttttctgcgcgtaatctgctgcttgcaaacaaaaaaaccaccgctaccagcggtggtttgtttgccggatcaagagctaccaactctttttccgaaggtaactggcttcagcagagcgcagataccaaatactgtccttctagtgtagccgtagttaggccaccacttcaagaactctgtagcaccgcctacatacctcgctctgctaatcctgttaccagtggctgctgccagtggcgataagtcgtgtcttaccgggttggactcaagacgatagttaccggataaggcgcagcggtcgggctgaacggggggttcgtgcacacagcccagcttggagcgaacgacctacaccgaactgagatacctacagcgtgagctatgagaaagcgccacgcttcccgaagggagaaaggcggacaggtatccggtaagcggcagggtcggaacaggagagcgcacgagggagcttccagggggaaacgcctggtatctttatagtcctgtcgggtttcgccacctctgacttgagcgtcgatttttgtgatgctcgtcaggggggcggagcctatggaaaaacgccagcaacgcggcctttttacggttcctggccttttgctggccttttgctcacatgttctttcctgcgttatcccctgattctgtggataaccgtattaccgcctttgagtgagctgataccgctcgccgcagccgaacgaccgagcgcagcgagtcagtgagcgaggaagcggaagagcgcccaatacgcaaaccgcctctccccgcgcgttggccgattcattaatgcagctgtggaatgtgtgtcagttagggtgtggaaagtccccaggctccccagcaggcagaagtatgcaaagcatgcatctcaattagtcagcaaccaggtgtggaaagtccccaggctccccagcaggcagaagtatgcaaagcatgcatctcaattagtcagcaaccatagtcccgcccctaactccgcccatcccgcccctaactccgcccagttccgcccattctccgccccatggctgactaattttttttatttatgcagaggccgaggccgcctcggcctctgagctattccagaagtagtgaggaggcttttttggaggcctaggcttttgcaaaaagcttggacacaagacaggcttgcgagatatgtttgagaataccactttatcccgcgtcagggagaggcagtgcgtaaaaagacgcggactcatgtgaaatactggtttttagtgcgccagatctctataatctcgcgcaacctattttcccctcgaacactttttaagccgtagataaacaggctgggacacttcacatgagcgaaaaatacatcgtcacctgggacatgttgcagatccatgcacgtaaactcgcaagccgactgatgccttctgaacaatggaaaggcattattgccgtaagccgtggcggtctgtaccgggtgcgttactggcgcgtgaactgggtattcgtcatgtcgataccgtttgtatttccagctacgatcacgacaaccagcgcgagcttaaagtgctgaaacgcgcagaaggcgatggcgaaggcttcatcgttattgatgacctggtggataccggtggtactgcggttgcgattcgtgaaatgtatccaaaagcgcactttgtcaccatcttcgcaaaaccggctggtcgtccgctggttgatgactatgttgttgatatcccgcaagatacctggattgaacagccgtgggatatgggcgtcgtattcgtcccgccaatctccggtcgctaatcttttcaacgcctggcactgccgggcgttgttctttttaacttcaggcgggttacaatagtttccagtaagtattctggaggctgcatccatgacacaggcaaacctgagcgaaaccctgttcaaaccccgctttaaacatcctgaaacctcgacgctagtccgccgctttaatcacggcgcacaaccgcctgtgcagtcggcccttgatggtaaaaccatccctcactggtatcgcatgattaaccgtctgatgtggatctggcgcggcattgacccacgcgaaatcctcgacgtccaggcacgtattgtgatgagcgatgccgaacgtaccgacgatgatttatacgatacggtgattggctaccgtggcggcaactggatttatgagtgggccccggatctttgtgaaggaaccttacttctgtggtgtgacataattggacaaactacctacagagatttaaagctctaaggtaaatataaaatttttaagtgtataatgtgttaaactactgattctaattgtttgtgtattttagattccaacctatggaactgatgaatgggagcagtggtggaatgcctttaatgaggaaaacctgttttgctcagaagaaatgccatctagtgatgatgaggctactgctgactctcaacattctactcctccaaaaaagaagagaaaggtagaagaccccaaggactttccttcagaattgctaagttttttgagtcatgctgtgtttagtaatagaactcttgcttgctttgctatttacaccacaaaggaaaaagctgcactgctatacaagaaaattatggaaaaatattctgtaacctttataagtaggcataacagttataatcataacatactgttttttcttactccacacaggcatagagtgtctgctattaataactatgctcaaaaattgtgtacctttagctttttaatttgtaaaggggttaataaggaatatttgatgtatagtgccttgactagagatcataatcagccataccacatttgtagaggttttacttgctttaaaaaacctcccacacctccccctgaacctgaaacataaaatgaatgcaattgttgttgttaacttgtttattgcagcttataatggttacaaataaagcaatagcatcacaaatttcacaaataaagcatttttttcactgcattctagttgtggtttgtccaaactcatcaatgtatcttatcatgtctggatcaactggataactcaagctaaccaaaatcatcccaaacttcccaccccataccctattaccactgccaattacctagtggtttcatttactctaaacctgtgattcctctgaattattttcattttaaagaaattgtatttgttaaatatgtactacaaacttagtagt

SEQ ID NO: 190 - DNA, 20 bp, Artificial sequence
  Synthetic construct
aggcgcagctcccgggctgg

What is claimed is:

1. A chimeric polypeptide comprising, from N-terminus to C-terminus:
a) an extracellular ligand-binding domain having a binding affinity for a selected ligand;
b) a linking polypeptide having:
(i) at least about 80%, 85%, 90%, 95%, 96%, 97%, 98%, 99%, or 100% sequence identity to a Notch juxtamembrane domain (JMD) wherein a LIN-12-Notch repeat (LNR) and/or a heterodimerization domain (HD) of a Notch receptor has been deleted;
(ii) at least about 80%, 85%, 90%, 95%, 96%, 97%, 98%, 99%, or 100% sequence identity to a polypeptide hinge domain; or
(iii) a sequence of about 2 to about 40 amino acid residues;
c) a transmembrane domain having at least about 80%, 85%, 90%, 95%, 96%, 97%, 98%, 99%, or 100% sequence identity to the transmembrane domain of a Type 1 transmembrane receptor and comprising one or more ligand-inducible proteolytic cleavage sites; and
d) an intracellular domain comprising a zinc finger-containing transcriptional effector (ZTE), wherein binding of the selected ligand to the extracellular binding domain induces cleavage at a ligand-inducible proteolytic cleavage site within the transmembrane domain.

2. The chimeric polypeptide of claim 1, further comprising a stop-transfer-sequence (STS) in between the transmembrane domain and the intracellular domain.

3. The chimeric polypeptide of any one of claims 1 to 2, wherein the linking polypeptide comprises an amino acid sequence having at least about 80%, 85%, 90%, 95%, 96%, 97%, 98%, 99%, or 100% sequence identity to a Notch JMD according to any one of SEQ ID NOS: 11-19.

4. The chimeric polypeptide of any one of claims 1 to 2, wherein the linking polypeptide has a length ranging from 1 to 40 amino acid residues.

5. The chimeric polypeptide of claim 4, wherein the linking polypeptide comprises a glycine-serine linker.

6. The chimeric polypeptide of any one of claims 4 to 5, wherein the linking polypeptide has the amino acid sequence (GGS)n wherein n is an integer from 1 to 50.

7. The chimeric polypeptide of claim 6, wherein n is 18, 15, 12, 9, 6, or 3.

8. The chimeric polypeptide of claim 7, wherein n is 3.

9. The polypeptide of any one of claims 4 to 8, wherein the linking polypeptide comprises an amino acid sequence at least about 80%, 85%, 90%, 95%, 96%, 97%, 98%, 99%, or 100% sequence identity to any one of SEQ ID NOS: 25-28.

10. The chimeric polypeptide of any one of claims 1 to 2, wherein the linking polypeptide comprises a hinge domain capable of promoting oligomer formation of the chimeric polypeptide via intermolecular disulfide bonding.

11. The chimeric polypeptide of claim 10, wherein the hinge domain is derived from a CD8α hinge domain, a CD28 hinge domain, a PD-1 hinge domain, a CTLA4 hinge domain, an OX40 hinge domain, an IgG1 hinge domain, an IgG2 hinge domain, an IgG3 hinge domain, and an IgG4 hinge domain, or a functional variant of any thereof.

12. The chimeric polypeptide of any one of claims 10 to 11, wherein the hinge domain is derived from a CD8α hinge domain or a functional variant thereof.

13. The chimeric polypeptide of any one of claims 10 to 11, wherein the hinge domain is derived from a CD28 hinge domain or a functional variant thereof.

14. The chimeric polypeptide of any one of claims 10 to 11, wherein the hinge domain is derived from an OX40 hinge domain or a functional variant thereof.

15. The chimeric polypeptide of any one of claims 10 to 11, wherein the hinge domain is derived from an IgG4 hinge domain or a functional variant thereof.

16. The chimeric polypeptide of any one of claims 10 to 15, wherein the hinge domain comprises an amino acid sequence having at least about 80%, 85%, 90%, 95%, 96%, 97%, 98%, 99%, or 100% sequence identity to any one of SEQ ID NOS: 20-24.

17. The chimeric polypeptide of any one of claims 2 to 16, wherein the stop-transfer-sequence comprises an amino acid sequence having at least about 80%, 85%, 90%, 95%, 96%, 97%, 98%, 99%, or 100% sequence identity to any one of SEQ ID NOS: 39-54.

18. The chimeric polypeptide of any one of claims 1 to 17, wherein the transmembrane domain comprises an amino acid sequence having at least 80%, 85%, 90%, 95%, 96%, 97%, 98%, 99%, or 100% sequence identity to any one of SEQ ID NOS: 29-38.

19. The chimeric polypeptide of any one of claims 1 to 18, wherein the extracellular domain comprises an antigen-binding moiety capable of binding to a ligand on the surface of a cell.

20. The chimeric polypeptide of any one of claims 1 to 19, wherein the cell is a pathogenic cell.

21. The chimeric polypeptide of any one of claims 1 to 20, wherein the ligand comprises a protein or a carbohydrate.

22. The chimeric polypeptide of any one of claims 1 to 21, wherein the ligand is selected from the group consisting of CD1, CD1a, CD1b, CD1c, CD1d, CD1e, CD2, CD3d, CD3e, CD3g, CD4, CD5, CD7, CD8a, CD8b, CD19, CD20, CD21, CD22, CD23, CD25, CD27, CD28, CD33, CD34, CD40, CD45, CD48, CD52, CD59, CD66, CD70, CD71, CD72, CD73, CD79A, CD79B, CD80 (B7.1), CD86 (B7.2), CD94, CD95, CD134, CD140 (PDGFR4), CD152, CD154, CD158, CD178, CD181 (CXCR1), CD182 (CXCR2), CD183 (CXCR3), CD210, CD246, CD252, CD253, CD261, CD262, CD273 (PD-L2), CD274 (PD-L1), CD276 (B7H3), CD279, CD295, CD339 (JAG1), CD340 (HER2), EGFR, FGFR2, CEA, AFP, CA125, MUC-1, MAGE, alkaline phosphatase, placental-like 2 (ALPPL2), B-cell maturation antigen (BCMA), green fluorescent protein (GFP), enhanced green fluorescent protein (EGFP), and signal regulatory protein α (SIRPα).

23. The chimeric polypeptide of any one of claims 1 to 22, wherein the ligand is selected from cell surface receptors, adhesion proteins, integrins, mucins, lectins, tumor-associated antigens, and tumor-specific antigens.

24. The chimeric polypeptide of any one of claims 1 to 23, wherein the ligand is a tumor-associated antigen or a tumor-specific associated antigen.

25. The chimeric polypeptide of any one of claims 1 to 24, wherein the extracellular binding domain comprises the ligand-binding portion of a receptor.

26. The chimeric polypeptide of any one of claims 19 to 25, wherein the antigen-binding moiety is selected from the group consisting of an antibody, a nanobody, a diabody, a triabody, or a minibody, a F(ab′)₂ fragment, a Fab fragment, a single chain variable fragment (scFv), a single domain antibody (sdAb), or a functional fragment thereof.

27. The chimeric polypeptide of claim 26, wherein the antigen-binding moiety comprises an scFv.

28. The chimeric polypeptide of any one of claims 19 to 27, wherein the antigen-binding moiety is a tumor-associated antigen selected from the group consisting of CD19, B7H3 (CD276), BCMA (CD269), ALPPL2, CD123, CD171, CD179a, CD20, CD213A2, CD22, CD24, CD246, CD272, CD30, CD33, CD38, CD44v6, CD46, CD71, CD97, CEA, CLDN6, CLECL1, CS-1, EGFR, EGFRvIII, ELF2M, EpCAM, EphA2, Ephrin B2, FAP, FLT3, GD2, GD3, GM3, GPRC5D, HER2 (ERBB2/neu), IGLL1, IL-11Rα, KIT (CD117), MUC1, NCAM, PAP, PDGFR-β, PRSS21, PSCA, PSMA, ROR1, SIRPα, SSEA-4, TAG72, TEM1/CD248, TEM7R, TSHR, VEGFR2, ALPI, citrullinated vimentin, cMet, and Axl.

29. The chimeric polypeptide of claim 28, wherein the tumor-associated antigen is CD19, CEA, HER2, MUC1, CD20, or EGFR.

30. The chimeric polypeptide of claim 29, wherein the tumor-associated antigen is CD19.

31. The chimeric polypeptide of any one of claims 1 to 30, wherein the ligand-inducible proteolytic cleavage site is a γ-secretase cleavage site.

32. The chimeric polypeptide of any one of claims 1 to 31, wherein the ZTE comprises:
(a) a first domain comprising a DNA-binding zinc finger protein domain (ZF protein domain), and
(b) a second domain through which the ZTE exerts its effect (effector domain), wherein the ZTE having the Formula I:
[effector domain]ₐ-[ZF protein domain]-[effector domain]_{b} (Formula I),
wherein a and b are each independently an integer from 0 to 5, and at least one of a and b is not 0;
wherein the ZF protein domain comprises 1 to about 10 zinc finger arrays (ZFA);
wherein the ZFA comprises about 6 to about 8 zinc finger motifs having the Formula II (from N-terminal to C-terminal):
X_{c}CX_{d}CXₑ-(helix)-HX_{f}H-L² (Formula II),
wherein L² is a linker peptide having about 4-6 amino acid residues, C is Cys, H is His, each X is independently any amino acid, c is an integer from 0 to 3, d is an integer from 1 to 5, e is an integer from 2 to 7, f is an integer from 3 to 6, and (helix) is a peptide domain of about 6 amino acids that forms an α-helix,
wherein the ZFA is capable of binding a specific nucleic acid sequence.

33. The chimeric polypeptide of claim 32, wherein the ZFA of the ZTE is capable of specifically binding to a target nucleic acid sequence selected from the group consisting of SEQ ID NOs: 61-71.

34. The chimeric polypeptide of claim 32, wherein the ZFA comprises a sequence having at least about 90% identity to a sequence selected from the group consisting of SEQ ID NOs: 55-60.

35. The chimeric polypeptide of claim 32, wherein the ZFA has a sequence having about 100% identity to a sequence selected from the group consisting of SEQ ID NOs: 55-60.

36. The chimeric polypeptide of any one of claims 32 to 35, wherein the effector domain comprises an effector domain selected from the group consisting of a transcription activating domain, a transcription repressor domain, or an epigenetic effector domain.

37. The chimeric polypeptide of claim 36, wherein the effector domain comprises a transcription activating domain selected from the group consisting of Herpes Simplex Virus Protein 16 (HSV VP16) activation domain; an activation domain consisting of four tandem copies of VP16 (VP64); a p65 activation domain of NFκB; an Epstein-Barr virus R transactivator activation domain (Rta); a tripartite activator consisting of VP64, and Rta activation domains (VPR); and a histone acetyltransferase core domain of the human E1A-associated protein p300 (p300 HAT core activation domain).

38. The chimeric polypeptide of claim 36, wherein the effector domain comprises a transcription repressor domain selected from the group consisting of a Kruppel associated box repression domain (KRAB); a Repressor Element Silencing Transcription Factor repression domain (REST); a WRPW motif of the hairy-related basic helix-loop-helix repressor proteins repression domain (WRPW); a DNA (cytosine-5)-methyltransferase 3B repression domain (DNMT3B); and an HP1 alpha chromoshadow repression domain.

39. The chimeric polypeptide of claim 36, wherein the effector domain comprises an epigenetic effector domain selected from the group consisting of a DNA methyltransferase DNMT (DNMT1, DNMT3), HAT1, GCN5, PCAF, MLL, SET, DOT1, SUV39H, G9a, KAT2A/B, EZH1/2, TET1/2, a SIRT family protein effector domain, a histone deacetylase, LSD1, and a KDM family protein effector domain.

40. The chimeric polypeptide of any one of claims 36 to 39, wherein the effector domain comprises a domain from a human protein.

41. The chimeric polypeptide of any one of claims 1 to 40, wherein the intracellular domain further comprises a nuclear transport signal sequence.

42. The chimeric polypeptide of any one of claims 1 to 41, wherein the chimeric polypeptide comprises an amino acid sequence having at least 80% sequence identity to any one of SEQ ID NOS: 1-9 and 113-123.

43. A recombinant nucleic acid comprising a nucleotide sequence that encodes a chimeric polypeptide according to any one of claims 1 to 42.

44. The recombinant nucleic acid of claim 43, wherein the nucleotide sequence is incorporated into an expression cassette or an expression vector.

45. The recombinant nucleic acid of claim 44, wherein the expression vector is a viral vector.

46. The recombinant nucleic acid of claim 45, wherein the viral vector is a lentiviral vector, an adenovirus vector, an adeno-associated virus vector, or a retroviral vector.

47. The recombinant nucleic acid of any one of claims 43 to 46, wherein the recombinant nucleic acid further comprises a response element, wherein the response element comprises:
a. a ZFA target sequence;
b. an engineered responsive promoter operably linked to the ZF target sequence; and
c. a polynucleotide of interest.

48. The recombinant nucleic acid of claim 47, wherein the polynucleotide of interest encodes a regulatory RNA, a regulatory protein, a therapeutic protein, or a detectable label.

49. The recombinant nucleic acid of claim 48, wherein the detectable label is a fluorescent protein.

50. The recombinant nucleic acid of claim 48, wherein the therapeutic protein is a chimeric antigen receptor (CAR).

51. The recombinant nucleic acid of claim 48, wherein the regulatory RNA is an siRNA, shRNA, or miRNA.

52. A recombinant cell comprising:
a) a chimeric polypeptide according to any one of claims 1 to 42; and/or
b) a recombinant nucleic acid according to any one of claims 43 to 51.

53. The recombinant cell of claim 52, wherein the recombinant cell is a eukaryotic cell.

54. The recombinant cell of claim 53, wherein the eukaryotic cell is a mammalian cell.

55. The recombinant cell of claim 54, wherein the mammalian cell is an immune cell, a neuron, an epithelial cell, and endothelial cell, or a stem cell.

56. The recombinant cell of any one of claims 52 to 55, further comprising an engineered response element comprising i) a ZFA target sequence to which a ZFA of the ZTE of the chimeric polypeptide specifically binds, ii) a promoter sequence, wherein the nucleic acid target sequence is operably linked to the 5′ end of the promoter sequence, and iii) a polynucleotide of interest operably linked to the promoter sequence, wherein binding of the ZTE to the ZFA target sequence modulates transcription initiation of a polynucleotide of interest.

57. The recombinant cell of claim 56, wherein the engineered response element is present in a nucleic acid vector, plasmid, DNA minicircle, minichromosome, or host chromosome.

58. The recombinant cell of claim 56 or 57, wherein the polynucleotide of interest encodes a protein, regulatory RNA, or an antisense oligonucleotide.

59. The recombinant cell of any one of claims 56 to 58, wherein the ZFA target sequence comprises a sequence that is orthogonal to the recombinant cell genome.

60. The recombinant cell of any one of claims 56 to 59, wherein the ZFA target sequence comprises a nucleotide sequence selected from the group consisting of SEQ ID NOs: 61-71.

61. The recombinant cell of any one of claims 55 to 60, wherein the immune cell is a B cell, a monocyte, a natural killer cell, a basophil, an eosinophil, a neutrophil, a dendritic cell, a macrophage, a regulatory T cell, a helper T cell, a cytotoxic T cell, or other T cell.

62. A cell culture comprising a recombinant cell according to any one of claims 52 to 61, and a culture medium.

63. A method for making an engineered cell, comprising:
a. providing a cell capable of protein expression; and
b. transducing the cell with the recombinant nucleic acid of any one of claims 43 to 51.

64. The method of claim 63, wherein the recombinant nucleic acid is a recombinant nucleic acid of any one of claims 43 to 51, and wherein the method further comprises:
c. transducing the cell with a recombinant nucleic acid that encodes a response element, wherein the response element comprises:
i. a ZFA target sequence;
ii. an engineered responsive promoter operably linked to the ZF target sequence; and
iii. a polynucleotide of interest.

65. The method of claim 63, wherein the recombinant nucleic acid is a recombinant nucleic acid of any one of claims 47 to 51.

66. A pharmaceutical composition comprising:
a) a recombinant nucleic acid according to any one of claims 43 to 51; and/or
b) a recombinant cell according to any one of claims 52 to 61; and
c) a pharmaceutically acceptable carrier.

67. The pharmaceutical composition of claim 66, wherein the composition comprises a recombinant nucleic acid according to any one of claims 43 to 51, and a pharmaceutically acceptable carrier.

68. The pharmaceutical composition of claim 67, wherein the recombinant nucleic acid is encapsulated in a viral capsid or a lipid nanoparticle.

69. A method for modulating an activity of a target cell in an individual, the method comprising administering to the individual an effective number of the recombinant cells according to any one of claims 52 to 61, wherein the recombinant cells modulate an activity of the target cell in the individual.

70. The method of claim 69, wherein the wherein the target cell is a pathogenic cell.

71. The method of claim 71, wherein the wherein the target cell is a cancer cell.

72. The method of any one of claims 69 to 71, wherein modulation of the activity the target cell results in the death of the target cell.

73. A method for modulating an activity of a cell, the method comprising:
a) providing a recombinant cell according to any one of claims 52 to 61; and
b) contacting the recombinant cell with the selected ligand, wherein binding of the selected ligand to the extracellular ligand-binding domain results in cleavage of a ligand-inducible proteolytic cleavage site and release of the intracellular domain, wherein the release of the intracellular domain results in modulation of an activity of the recombinant cell.

74. The method of claim 73, wherein the contacting is carried out in vivo, ex vivo, or in vitro.

75. The method of claim 73 or 74, wherein the release of the intracellular domain results in binding of the ZTE of the released intracellular domain to a ZFA target sequence, which results in modulation of the expression initiation of a polynucleotide of interest, which results in modulation of an activity of the recombinant cell.

76. The method of any one of claims 73 to 75, wherein the activity of the cell to be modulated is selected from the group consisting of: expression of a selected gene, proliferation, apoptosis, non-apoptotic death, differentiation, dedifferentiation, migration, secretion of a molecule, cellular adhesion, and cytolytic activity.

77. The method of any one of claims 73 to 76, wherein the ZTE modulates expression of a gene.

78. The method of any one of claims 73 to 76, wherein the ZTE modulates expression of a heterologous gene product.

79. The method of claim 77 or 78, wherein the gene product is selected from the group consisting of chemokine, a chemokine receptor, a chimeric antigen receptor, a cytokine, a cytokine receptor, a differentiation factor, a growth factor, a growth factor receptor, a hormone, a metabolic enzyme, a pathogen-derived protein, a proliferation inducer, a receptor, an RNA guided nuclease, a site-specific nuclease, a T cell receptor, a toxin, a toxin derived protein, a transcriptional regulator, a transcriptional activator, a transcriptional repressor, a translational regulator, a translational activator, a translational repressor, an activating immuno-receptor, an antibody, an apoptosis inhibitor, an apoptosis inducer, an engineered T cell receptor, an immuno-activator, an immuno-inhibitor, an immune cell receptor, and an inhibiting immuno-receptor.

80. The method of any one of claims 73 to 79, wherein the released ZTE modulates differentiation of the cell, and wherein the cell is an immune cell, a stem cell, a progenitor cell, or a precursor cell.

81. A method for the treatment of a health condition in an individual in need thereof, the method comprising administering to the individual a first therapy comprising an effective number of the recombinant cell according to any one of claims 52 to 61, wherein the recombinant cell treats the health condition in the individual.

82. A kit for modulating an activity of a cell, inhibiting a target cell, or treating a health condition in an individual in need thereof, the system comprising:
a) a chimeric polypeptide according to any one of claims 1 to 42;
b) a recombinant nucleic acid according to any one of claims 43 to 51;
c) a recombinant cell according to any one of claims 52 to 61; and/or
d) a pharmaceutical composition according to any one of claims 66 to 68.

83. A kit for modulating an activity of a cell, the kit comprising:
a) a chimeric polypeptide according to any one of claims 1 to 42;
b) a recombinant nucleic acid according to any one of claims 43 to 51; and/or
c) an engineered response element comprising:
i) a ZFA target sequence;
ii) an engineered responsive promoter operably linked to the ZFA target sequence; and
iii) a polynucleotide of interest;
wherein binding of the ZTE to the nucleic acid target sequence modulates transcription initiation of the polynucleotide of interest.

84. The use of a pharmaceutical composition according to any one of claims 66 to 68 for the treatment of a health condition.
